United States Patent Application Publication US 2023/0172999 A1 - sequence listing, part 12

SEQ ID NO: 12 - DNA, 3781543 bp, Roseburia hominis (residues 1,890,773-3,781,543 of 3,781,543)
  misc_feature (692547)..(692556): n is a, c, g, or t
  misc_feature (837813)..(837822): n is a, c, g, or t
  misc_feature (901933)..(901942): n is a, c, g, or t
  misc_feature (1031578)..(1031780): n is a, c, g, or t
  misc_feature (1085168)..(1085177): n is a, c, g, or t
  misc_feature (1453511)..(1453668): n is a, c, g, or t
  misc_feature (1750746)..(1750755): n is a, c, g, or t
  misc_feature (1811995)..(1812004): n is a, c, g, or t
  misc_feature (1842267)..(1842276): n is a, c, g, or t
  misc_feature (2156018)..(2156027): n is a, c, g, or t
  misc_feature (2164406)..(2164574): n is a, c, g, or t
  misc_feature (2312340)..(2312349): n is a, c, g, or t
  misc_feature (2323926)..(2324112): n is a, c, g, or t
  misc_feature (2462991)..(2463160): n is a, c, g, or t
  misc_feature (2511696)..(2511705): n is a, c, g, or t
  misc_feature (2789043)..(2789052): n is a, c, g, or t
  misc_feature (2872345)..(2872354): n is a, c, g, or t
  misc_feature (2888925)..(2889088): n is a, c, g, or t
  misc_feature (2988230)..(2988239): n is a, c, g, or t
  misc_feature (3016170)..(3016179): n is a, c, g, or t
  misc_feature (3080518)..(3080527): n is a, c, g, or t
  misc_feature (3217373)..(3217557): n is a, c, g, or t
  misc_feature (3732997)..(3733006): n is a, c, g, or t
  misc_feature (3777260)..(3777269): n is a, c, g, or t
gggacagcactgcgaggagcatcttcatctgaaatgtgtcaaatgtggatgcatcattcatctcgactgcggatttatggatgagattgcagagcacatccaaaaggaccacggatttcagctgcagtgcaaaaattccatattatacggtatctgtaaagattgcagacaggaatagtctgcagtctttttttatataatgaacaaaatgaccatgacagtgaggaatggaaaacggaacagaaaggaatggagagaagcaggcggatccgatcggccgtgatccttgaggcggcactgctttttctgatgggagtaatcctctgggagaatggaaagctgccgcaaaaatcagccgtggaaacaacggcggacggttatatcaaatgggtagattttaatgtgtcgtatgaggcattgtccagggcatacgagtatgacataagcagttacggagaaaagcagcatcttgactggattgatcttctggcgtacgtcggggcaaagaacggcggagattttgtcaagcagattgcatatccggtgatacacaaattcttttgtctcggcggacaatgccacccggcggttgcgctgctcggcagtgcgaagcttcttttcaaggacagccttttctttgtccagagattccagttcagcaatgatatactttgccgcagcagaatcggcgctgccggagagcgcgtttatcagattccggatggagtcggtcgtctttttcagatccgcgcgcattttgccggtatcaacgtaagagacattttcttcaagttcaatgctgtccggagacagcttgatcttttttaattcctgtaaaaaacggtcgtcaatgtcattcacccgcgtatagccggtatcgtaggcggatgcgccctcacgcgccattttagggcagtagtaataggagaacaggctgccgttctttttatatgtacggatattcattttcacgccgcacttgcagcggagcgtaccctttagaatcccggcttcgtacttggcgtaccgggtggatttgttctgaccgagacgtttctggatggcgatccagtcggcaccggagaggatcggatcatgaatgccgatggcgatcgagtaggtatcttttatgacggtcgttccgttggactgcgtggtgcggccgtagccgatcagcccgtgcctgccgtcgaagagtgccggatcaggaagcttgtagcctttttccagaaagtagtagtacgcgtccatatcgttggcgcagtagaccggattggtgaagaggttgtatagcttgctgcagctgtaaaaagcattccgttccgtgcggattccctcctgccgcagtgtatgttccaacttggtgatggatgtgccggagagcatgagggagaagatatactttaccgtcttgatccgctgcgcgtccacgatgagataggagtgcgtcttatcgcctattttcttgcggacggatgccatacccggcggcagggtgccgcccgtccacttcccggcttcccccaggcttgccatattgtccgcaacacgctctgcggtgttctcgcgctccaactgtgcaaatgccgagaggatgtacataacggtccgtcccatcggtgtagaagtgtcaaaggattcttttaccgacaggaaagagacattgtgttgctgcagcgtctcatagatctcggagaagtccttgacgcttcggctgatacggtccagcttgtagacgatgatgatatcgagttcgtccgccttgacatccgccatcagttcggtaaaggaagggcggtgcgtattcttcccggagaacccctcgtccttgtcgtagattctgaaatccagtttctgatccttgaacatcagccgggcgtagtccttgcacgccgtgatctgcacctgcaccgagtcactgttgtcccggtagaccgattttcgcggatagattccgattctaagcatagtatcactcctttgttcctgtacagtgtatgtaaaaatgggtataaaaataacagccggcaaagaacgggtgttccgcttgcgtttggctgctccgaatgatacaatatgcttgttgagggcgattgttcattcagaacagttgcatttccgctccgcttattggtggggcgctttttgctgtttattttttcctaaattcttttgttcacgttctatttgtttgatgctcttttcgggtgttggaagattttctggcattgtgccaccaaggcggctgattgtgtcgcgaacttctttcccgacttcataatgggcctggtttgtcttttccttaccttgaatatgctcgcaccggagttttgcttctgtctgtgtggttcggaagagatttgcagcaagctcttcgtgtcccatgtaatcaagaatatcatcgtttttgcctaaatacttattagcttttatatccttggcagtcattccgccatataaacctttatatccgcagttttggaatatagcgtaatctaaaccagatttaacaccggcatctttagcggctgcaaccagcaacttgttgtgtttcttcatttccttacgaatagcaaggcgtttttggtcttcatccaaattatcgtaattatcaataagttcttgctgtctggtttttacggcaaagtatgattgaccgaggcgattactttttttcgaggatcgttattttgtgcaataaggtaacaagcgtagcgagaaagctcataatcgtcgattgtttttgctgcactattaggcatatctatcgttttgttgacgtcaacaaaatgttcagatgcaatgttttcgctaccttcgcaagcaacttttgctttttcaattaccctattgaaatttcgtcattccttatattcgagtgcaatctgtaattctcttgcataccagaattcttgtccatattcattagtgtgacgtattgattcaaacaaggattctgtatagctggtttcttcttctggcgtgagagctttagataaaactctttcagaaagtgcggttaatcgatcattgaattctgcttcgttcatatgtacttctttctgccattatcatttctttaaaatttttatatcaattccatgaccactaaattaggctggaaaaagataacataattatccagtttcgtgtatacaccatacttatttctgtagtaattaaggctagcaattaaaaactcctcggttacctcaaggtactccgctgattttgatatgctctgacagtggtgcaagtaagcatccacgatgccacgcaagccggccagcttattataggctacgatcctgtcgcgcatttcctgcttttggttttctacggtggactgatcaagtatgttgccggttgcatgaggtcaaacagctatagctctgccagcagtaatgcgtggacagcttcattgctgcggaactgacggaatccatcgtgtgcggtatcagctatgatatgttagaagctcactacggcattctcccgatcagcaggaggaacttttacaggcgacacaggacagcacagagattgatgcggcagaggacggcgtggctggtggaggagaaaaatgggtagatgaggatggtatggctaaatgtgtataaaatacacatatttgcattgacaatacacatataatgtgtataatataaacagaaggagaaaatacatgaagcaaagggatttaattaaaaagcttgaagcagcaggatttacactagaacggcatggtggaaatcatgatgtatatgtaagaggggaagacaaagaacagataccaagacacaaagaaattaatgaagtattagcgagagcaatcatgaggaaatggggattataaaatccccaaaccttgtgtatagatatagatagatgggaatggaggttgtttttaatgaaacaggtttatccagtaatattcacacagttaaacgatgaaaaagatacggtgttaatagaagttccagacttagagattcttacggaaggatttgggatggctgatgctgttgaaatggcgagagacgcaattggattaaagggtatttgttatgaggatgagggaaaggaaatcccgacgccaagaacgatggcagaggtaaatagttccaagggaacatttgcgggggctggtgaaagcttcgtgtcacttgtggatatcgattttcaagagtatcgtcggagagcagataataaaacggtacggaggaatgtgacacttccaaattggctaaatcaggaagcagaaaaggcgcatgtaaatgtgtcaagggttttacaggaagctcttatgatgaagcttggggtctcaagataatcagcagaagatagagttagaatttaggtgttagtaaaatagcattagatcctaactctttttttgtgcctaaaatggcacaaattttccccaaacctattgtatgatattatcagaaacattgcagtgataataccagaaaggggagaatacggtgggagtagataagaaaatattggagcagtatgtagatgcatgtgagatgatccgggagacggagcaggacattaagagattgaagcgtaagcggcaaacgattgtgccaggaagtgtaaaaggttcaatgaatgatttcccatacgcagagacacatttcaagattgaaggaacatcgttcacatacacggatgatacgcaattgcgcatggaagagaaactgctggaagagagaaaagcccagtcggaagagatcaagctacaggtggagcagtggatgaacggcataccggtacggatgcagaggatcatccggtataagttctttgaggaaatgagctgggaacaggcggctgtaagaatggggagaaaaagcaccgagggaaagaagcctgatgttccattcttttgccagtattatgaggaatatgggaaacatatggcgaaattggtggttaattcgggatatgatttttctggatttgatgttattataaaggtagggtatgagtataagtattttgcggaaaagcgtattgaagattatattgaacatgagatagtgcacatattgacgggcaagatattgaaagcgtagaggatttcaacgcattttttgaagaggtaaaagacttatatgtacctgaagtttctgattattcggatgaggtgcagaatggatttgaaacgcttgcggaagcatatgttaagataaaaaatggcgaagatgttctagaaaaagcaaaagaatatgtcgatcgatatatagaaaggtggaaacggtaatgcttagaactccatactgtttatcatgttcaaattgcatgacgggtatgcgctgcgacgcatatccagatggtattccaactgaggtattacatgcaaagaaaatagatggagagatatgcagagataatatagggtttaaaaagaaacaagatataccaccagccgataaaggttaggtggtatttttataccccaaattagtaataacgggacaaccggaaatttatgaaccgaacggtgcaaaggtgacgccaagtaagttcctccgggagtcctgtttttatattgtccgaaagccttatgacgtttaaactgtggcaatttgcccttatgcatggcatcaaaactgcatactgcggtggaggcaccacacttaaaaacagcgcaggaaaggaactggatgtaatgcgacggtagttctgggaagagaaaatgatgactattcgcggcgtgtcacggatctggcatcaaaactggcggagatatcggcaaccgcatctgagatggcggaaacagttaccgcgacaaataagacggttaatggaaatacaaccgatattcagaagcttgctgccgacatggattatctggctatgcagatggaggtgacattggatgagtaaaaattatgaaaaggtaaaagggtattatgataagaatctttggagcaaaacccgtgtgtacaatgcgataggaaagtggatcacagccgcggaatatgaggagatcaccggggagacatatgaggaaccggcgaagaaaagtgccgaggaagatacaactatgatgtaggaggagaatcatgaaacagacggagaatgatggctttaacgtaccggaagaacatgaattttatggtgttgcagcgcagaacgagaattgggagaagttagatgcgactttaacacaaattgagagtcggctacaggaaattgcagaagcaaaacagtaacagaaccatagtcatagcgccgaacaattgatctttgtgatcgagcgtccggcgctattcagttggcacaaacctgcataaacagtgttttatacttattataaggaaagaaaggaaaaggatatggaaaactttttaatcacacaagcatttttgtaggaatcgtcggcaggattatcgccggctggctcggcggctgggatatgctgcttaagctgatcgtgtttctagcggtggcagattatgtgaccggagttatcaagggtatttataccaagacactgagttcagagacgggcttcaaggggttgttgaaaaagattgtgatgttcattgtgatcgtagtagcatatacgattcagaaactgttgaatgatacgatcgcgctgcgagagatcgtgattatgttttacatctgcaacgaggcgcttagcctgctggagaacgcggcaatgtttatcccgatccctgacaagcttaaggatgtgctgttgcagctgagagacaaggaggtagaggacaatggcaaatagaaaaattggacaggcaggacttgcccttatcaagcagtatgagggatgcaggctggcagcataccggtgcgcagccggtgtatggaccatcgggtacggtcacacggcgggcgtacatagcggcatgacaatcacacaggcgcaggcggacgcatatctgcagcaggacattgcgaagtttgagggatacgttaacaatcccgcatacgttccgatcacggagcagctcaaccagaatcagtttgatgcgctggtcagctttgcctttaacttgggcgccggaaatctccggaagctttgcaagggcagaacagcggcgcagatcgcacaggcaatgacacagtattgcaaagccaacggcaaggtgctggcaggattaaggcggcgccgggcggcagaacaggcattgtttaacaagccggtaagcgcggctacaccggcacagaatcagaatacggaggattacaacatgaagacgatcaaaaagggtagcaaaggcaacgcggtaaaggggtatggcagatcatcatcggcgcggctgcggacggcatcttcggcagcggcacggaatcggcaaccaagatctggcagagcaatcacgggctggcggcagatggcgtggtcggtaagatgaattggaaagcgggactggaggaactgtaagagtatgaccggcgggagaaatcctgccggtatgttatgtaaattgacatgcgtaatgcctgtatttactgataaacaggacgatccatgtaagatagaaaagaaaattttggtacatttttagaattgaacgaatgttcgaattgcgatatgattagtgtataaagaatatgcacattgagcataaaaatagcccggaacgttgggacgaaaccgagctacttggcttaattaagttgtatatagtataacatattccgacaaatttctcaagtttttcttgtagttcaatacaaatgcagtataataaaagaaaaacgttgggagagtgtatttatggaaaaaacagtaaaaattaagtgcaagtattatcaacttagggcggtaagcaacggaaatattacagaaaatttatatgatttaaggcagtggattaatgatatcgaagagatgcctttagatcaaaggaaaagaaatgtaagcaatattgttggcagattagaagaacaagttgtggttggagattcggagtgttatgtattaaattttatgcgtatggatgaagtgagtacagtatataaagtcaagggaaaccagcctgcggagcatgtggatattgatgtagagtcaaatgaacacatagctaaaaacacagttgtgttatatgatgctgaaaatggtattgtaatgattcagagcaatcgaggaagctatacggaaaaatcaatacaaggttatataaattctttttttgaagaacaagtatgttgcttgctacctatatttgataacgttaatttcatggggaatgatgtagactatttgaagttagatgtacgattggcaaatattagacaatttgaagcaacgagtaattcaagtttcgaatatttagtagatggaattaatagagtagaaggtttgaatgcgcacatagagataggtcttggatataatagaaatgcaaaactgaatagtgatgaggttagaattgcaattgcagatttagtaaataataaaggatgtgttacaagtgcaaaatttagattgtccgatgatcaaaaatcaggtgtatatgatttgtttgacaatctttgcaatgacacagttgtttgtgcagtcaatgatagaactggaggtataccatttgaagtcctggctgagagaatgtacgataaatatatttatgagcattctcgagatagagttctgtctgcgttaattaattagaaaggaatggttgtatggataggaaagaaaaggcgaaatataaatggaaagaaatctattcatacattgtgccaagtgtaattacagcaggatattttgtgtgcattattttggcagagaaaggtaagatagaagttacgctaatgcagcaaagtaaatatttcgaaaaaatgctagaatcattaattacgtttatgtcgattatattaagtgtatttggtttcctaataccgacttttttggggggaaagggagatacgaaggctattaattactttttaaaatatgctgatatgaaaatatttgctgccaaactaaagaatattgtagctgtgggtttgattgatatatttataacgagtgttttgcttttaacagatattatccccaatatgatcatgaacataataattataatatggttatggctattgtttttctttatgtgtagttcttacagatttataagtattatgattaatttattattggttgagaaagaagattatgtgcagaaagcagcaaacgaagtaagtgaagagacaaaaatggaagttcataagaagttgagaaaaatataaaattaaggataccccagccattcggctggggttactttatattcctatcggaaccccaatcatcgccgtagaatccggctacgtagaggcgatcggttggaaccagtacggcggatggcgcatcggcatccgcagctttgacgggaagcgctactattattatgcgcatctgcgccagaactatccgtaccgggaacagttgaaggagggcgatgtcgtgacggcaggggatgtgatcggctatatggggcataccgggtacagcacgaaggaaaatgtcaacaacatagacacggttcatctgcatttcgggctgcagctgatctttgacgaggcgcagaaagagggaaacaacgagatctgggtggactgctataatctgacgcgctttttatataagaaccgttccgcggtgcagaaagtgggggaaagcagggagtggaagaggacgctgcagatgacggatccggcggttgtaaaatatcagaaaaccataaaaaaacagtgaaaaaatattgacaatagaagcgggagggtggaaaattttgatatacggatagggaggaggagtgtctgtgatagaacgtcgatggattcaaaaagggtaccggattttttttgctattgcacttcttatctgtgtgggaggcattccggcatatgcagaagaactggtaccggacgctggggaaatcaccggcagggtattatttatcagttcctattcctatgcatgggagacggttccggaacagattcgcggtataaaagaagcattgggcgctggtgtacagctggattatcagtttatggataccaaaaatgtcgagacggcggagagtgaacagctattttaccagacgctaacatactatctgaagatggttccggcgtatgatgttgtgattgtaggagacgatgcggcgtttcagtttgcaatgacgtatcgggatgagctgtttgcgcagacgccggttgtttttgagggagtcaatgacggggaactggcgaagaaggcggcagcagacccgcttgtgacgggcgtggttgagacgctctcttatgagaatacgatcacgctggcaaagaagctgtatccggatgcaagacaggtggtaggaatactggatgatacggtgaccggagagggcgaacgcaaggaattccagtattacgatactgtttttccagagttggactttgtagagatcgacgcttcaaagctctcccaggaagaattaaaaagacaggttgctgcgctgggggaggagagcattctggtctatattatgtgcagcagggatggcgacgggaatgtgtacgcggcggcggaagcgatccagatgctgagtgatgtggcgcagattccgatgttttcaattgtctcgcacggtatgggaaaaggatttttaggcggcgagattgtctcgcaggaacagatgggaaaaagggcaggagaaatggcggtgcagatactggagggcacggattgtgcagggatctccattgtgatggagccgccgaaggtatattgctttgatgaaaatgtgatgcgcaggtttggaatcagtgcatcaaagcttcccggggatgcagtcatcatcaatcacagggagaccttctgggaaaagaaccgggatacgatcagggcaacgctggtgattgctgccgtggcgttggcaatggtggcatggctggcggtggacaatatgcgccgacgcaaaatgaacgaagtgattaccagggcaaacgaaaaactgtcttacagtgcgcattacgatgtactgacacaccttaagaaccgtagtgtctttatggaagatatcaggcagcggattgtctccggggaagaatttacggtttttatgtatgatctggataattttaagcgggtgaacgacacctacggacacaatacaggggacgaggtgctgcgcgaagtggcacttcggtcgctggcggtggaggatggccatttcacaccgtaccgcctggcaggagatgagtttgtagcactgatcgactgcggcgattacagggtcatagagcgatatgcatctggtttgatggaacgtctgcaaaagccgtgcagaatgggagcggcggacgaggcactgggagtcagtctcggaatcgcggtgtggccggaacacggagcggatgcaacggaacttctggcagcggcggatgctgcgatgtatacagtgaagaaaaacggaaaaaatggatttgcattttataaggagccatgcgcaccgtaggaaacggtgcacatggctcctttttaagagtagaaaacgacttattttttcatgccggcgcgttttcttaaggttggatcaagaatacgcttgcggatacgaagactctccggtgtaacctccaggagctcgtcgacatcgatgaaatcgagtgcctgctccagacttaaaatcttaggcggaaccagagtcagtgcctcgtccgcagaagaggaacgcgtgttggtcaggtgttttttcttgcagacattcaattcgatatcctcggctctggaagaagaaccgatgaccatgccggcgtatactttttcgccaggtccaataaagagcgtaccgcggtcctgcgcggagaacagaccgtaggttacggactcaccggactcaaatgcgatcagggaaccgagcttgcggtaagcgatctcgcccttgtacggtgcatagccgttgaaaatggtgttgatgataccgttacccttggtatccgtcataaattcaccacggtaaccgatcaggccgcgggacgggatgttgaactccagacgtgtgtaaccgccggtaatcggtttcatgttcagcatttcgcccttgcgctggcttaacttttcgatgacggcaccggtaaattcatccggtacatcgacataagcaagctccatcggctctaacttcttgccgttctcatccgtgtggtagagaacttcagctttgctgacggcaaactcataaccctcgcggcgcatgttctcaatcagtacggacagatgaagctcaccgcggccggatactttgtaggaatccgggctgtccgtttcctcgacacgcagagagacatcggtgtttaattcgcggaacagacggtctcttaaatgacgggaggtaacgaatttaccctcctgtccggcgagcgggctgtcatttacgatgaaattcatggacagtgtcggctcggaaattttctggaacggaatggcaaccggattctcaggtgcgcagatggtatcaccgatatggatatctgcaataccggaaatggctacgatggaaccgatctttgcctctgtgacatccaccttgttcagaccgtcaaactcgtaaagcttgctgatgcggacacgtttctgcttgtccggctcgtggtggttgacaacaaccgcctcctgattgacctttaagcagccgttatcgacttttccgataccgatacgtccgacatattcgttgtaatcgatggtgctgatcaatacctgggtgttggcatccggatcgccctccggtgcagggatatagtcaaggatcgtgtcgaacagcggagtcatatcctttttgttgttcaccagatcgtcaagctcgcggacagcgtagccgtctcttgcagaagcaaaaaggaacgggcagtcaagctgttcctcggaagcgtcgagatccatgaaaagctcaagcacttcgtccacaacctcattcggacgtgcctccgggcggtcgactttgttgagacacacgataaccggaagagaaagctcgagcgctttcatcagaacgaacttggtctgcggcataacgccctcgaaagcgtcaacgaccagcacaacgccgtttaccatcttaaggacacgctcaacctcgccgccgaaatcagcgtggccaggggtgtcgatgacgttgatcttagttcctttataagtaatcgctgtatttttggaaagaatcgtgataccacgctctctctcaatatcattagagtccatgacacgctcctgaacctcctggttctcacggaacacgccgctctgttttaacaattcatcgaccagagtggtcttgccgtgatcgacatgggcgataattgcaatgttacggacatcttcacgtttcattttcatatacaaaatctctctttcctgtgtgaaacctagtctaaaaaagtaaccaatctattttatcatattttcagagatgcgcaagtggtacatgcgacaaaatccgccatttcattccctttgttatcgacatgttgcatgaaaattctggcaccggacgtgataaaaataatgtgtcaggcagatcataccggcagaacggaacgaaaaagaagaacaacgcaaaaaagagtatggtcgtaagaagggagaaagattcatggcagataaaatttttgaaaacaaccaggtgtcaattatgggagagattgtatccgatttccggttcagtcacgaagtgtacggagagggattttatatggtggatgtggcagtgaaccgcctgagcaattatctggactacattccattgatgatatccgagcggctgattgacgtaaatgctgattacataggacagatcatttatgtgaccgggcagttccggtcgtttaaccggcatgaggagaaaaagaaccgtcttgtcttatcggtgtttgtgcgggaactggagtttctggaggaactgcaggaggatatgaagagcaaccagatttttctggacggatatatctgcaaggaaccgatttaccggaagacgccgctgggacgggagattgcggatcttctgatcgccgtcaaccgttcctacggaaaatcagactatattccatgcatctgctggggtagaaacgcccggtttgcttccggctttgaagtgggaggacatgtgcaggtatggggcagaatccagagccgggaatacgtcaaaaagatctcggagcttgagacggaaaaacgggtggcttacgaggtgtccgtcagcaaggtggattttttagaggaataatcgaaagttccgttattgacaaccgttgttgatagtgctatgttaattttaactatatgatacatattttgatagaggttgcgtgctttaagagtagttttccggatgtgacaggcacaggggaagggaagcaaaaggaaagcatgccgaaagagcaaggcacctgctgccctggttcttgggcataaagctaagaactttatgactgtcatctttgcagatggggcgctatcggttctgtataatggcatgcagatatgcggcagaagaatcagaccggctcaccgagccggcttttttttactttttgttctgactctgatctgacaggggcaaaattgtaccatgggcatatattaacataggagaaacggaggattgacatggcgatattcaagggcgctggtgtagcgattgttacacccatgaaggaaaatgaagaggtaaattacgacaagctggaggaactggtcgaatggcagattgagcagggaacggatgcgattgtgattgtgggaacgaccggagagagttcgacgctcactacggaggagcattccgacgtgatccgggcggcagtgcgtttcgcaaagcatcgcgttccggtcattgccggcaccggttccaactgcaccagagaggcgattcacctttccgaagaggcggaaaaggcaggagcagacggacttttggctgtgaccccgtactacaacaaagcgacacagggcggattgatccgttactatacagagattgccgaggcggtaaagcttccgattatcatgtacaacgttcctggacgtaccggctgcaatattatgccggagaccgcagccacactctttaagaacgtggagaacattgtgggtatcaaggaggcgaccggtagtctggctcaggcatccaagctgatgtacttaacggacggcaagattgatttgtattccggcgaggacggcatcgtggtgcctctgatggcaatcggtgcgatcggtgtgatttccgtgtggtcgaatgtggcgccggcggatgtgcacgatatgtgcgcggctttctccgcgggggatcttttgcgcgcgagagaactgcagttaaaggcacagccgcttgtggatgcgctgttttccgaggtaaacccgattccggtgaagaaagcattgaatctgatgggactggaagtgggaccgcttcgttccccgctcacggagatgacaccggagaatgccgcgaagcttgcagaagcaatgaaaaattacggaataaagttagcataaaagaacagatgactccggcggaagggagccgtaaggccatccgccggagtatgtgtctgcaccgccggctgcatgcggcacgcggagcgggcagtacagagaagagaggataacgtacgatgattaaggcaatcatgaatggatgcaatggtaaaatgggacaggtcatctccgcaatctgcaaggaggatccgcagattgagatcgtggcgggagtggatctctatgacgggatcaaaaatgactatccggtattcccgaatatttccgtctgcgatgtgaaggcggatgtcatcatcgatttttccaatgcgaaggccgtggacgatcttctggtctatagtgtggataaaaagattccagtggttctgtgcacgacgggattgtcggaggaacagatggagcaggtaaaggcggcatcggggcaggtagcagtattaaagtccgcgaatatgtcgctgggaatcaatctgctgatgcagcttttagcgcaggcggcaacgattcttgcgccggcaggatttgacatggagatcgtggagaagcatcacaaccagaagctggatgcaccgagcggcacagcgctggcgctggcggactccatgaatgatgcgctgggacatgtctatgaatacaaatatgacagaagcagcgagcgcaaaaagagagatccgcacgagatcggaatctcggcagtgcgcggaggcagcatcgtcggggaacatgaggtcatcttcgcgggactcgacgaggtcattgagttcaagcataccgcatattcccgcagcgtctttggaaaaggggctgtggaggcggcaaagttcctcgccgggaaagaggcaggattttatgatatgcaggatgtgatccgggcaacgatggaacaggcagactgattggacaggcagacggataaggcagattgaaagcagatacagatggatcgaatgggaacaggagcgtggaaacgttttctgttcccatttttatacagggcagaaaacgaacaaaatctggtcagcagtgcgcggatatgttactatttgagaggtatcttcgattttgatattctgagggggaacatatggaaaaatatatggaaacagatctgcggtatttaaaaagtctggcaaatcagtatccgaccgtggctgcggcagcgacggagatcattaacctgcaggcgattttaagcctgccaaagggaacagaacatttcattacagatattcacggcgagtacgatcagttccagcacgtgatccggaacggttccggagcgattaagcgcaagatcgaggaagaattcgggaatgcgatcagtgcgggagagaagaaagcgattgcgaccctgatctattatccggagcagaagctagagcaggtgttaaagacagaagaaaatatggaggactggtataaggtctccctgtaccggctgatccgcatctgcaagagcgcttcgtcaaaatataccagatccaaggtgcgaaaagcgctgccgaaagattttgcgtatgtgatcgaggaactgctgaccggcagaccggatgtctccgatcaagaagcttattataatgagatcatccggtctgtgatccgcacaggcagggcgccggagcttgtgattgcgttctgcaatctgatccgcaggcttgtggtggatcatctgcatgtggtgggagatattttcgacaggggaccgtacccgaatctgattatggataccttgatgcagcatcattccgtggatattcagtgggggaaccacgatatatactggatgggagcggcggcgggaagcagaccctgcatctgcaacgcgatccgtatctctgccaagtacggcaatctgaaccttttagaggacggatacggcatcaatctggtgccgctcgccagacttgccatgagcagatacgacaaggatccctgcacctgctttaagctggattaccgggaggatgagtacgatgtgcgtgacgccatgctggatgagaaaatgcacaaggcgattacggtgatccagttcaagctggagggacagatgatcatgcgtcacccggagttcgggatggatgagcggcttttgctggacaagatcaatatcgaaaaaggaacggtgtgtgtggaggggaaggaatacccgatgaaggatctgaacttcccgacgatcgactggaagcatccgtatgaactgtcatcggaggaggaggacgtcatggagcggatcacgcaggcgttcttgaactgtgaaaaattacagcgtcacgtccgttttctgttcacacagggcagcctgtacaaggtctacaacgggaacctgctctaccacggctgtgtgccgatgaacgaggacggaacctttaccagagtaaatgtgtacggaaaagaatattccggcaaggcgctctacgatgtgctggagaattacgcgagaaaagggtactacgcgattgatcccggggagaagaaaaaggggctggatatcttgtggtttatctgggaaaaccagaattccccggtgttcggaaaagcaaaaatgacgacgtttgagcgctattttatcgcggacaaggcgacgcaccaggagccgaagaacccgtactaccgcctgctggaggaggaagaggtggtcaaccgcatcctctcggaattcgggcttgagggcgcggaggcacatatcatcaacggtcatattccggtggaggcgaagcggggagagtccccggtaaaatgcggcgggaagctgctcattattgacggcggattctccaaggcctaccagccgaagacggggattgcgggatatacgctgatctataattcctacggtctggtgcttgcggcgcatgaaccgtttgagtcggtcgaaaaggcggtgcaggacggaagcgatatcgcgtcgcatacgattctggtgcagcatgtcgtgcgacgcaagctggtggcggatacggacattggaagggagctgcgcgcttcgatccgtgatctggaggcgctgctgcaggcataccgggacggcatcctggtggagaagatttaaatagaaagatagaaggaagcaggaaaagaatatgtatatcggaaatcatctctcggcgtcaaagggctatgcggcgatggggcggatggcagtgaagctgggagcaaatacatttgcattttttacaagaaatccgagaggcggtgcggcaaaagcgattgatccggcggatgtggaaaagctgctggaactgatgcgggagcagcaatttggaaaactggtggcgcatgcaccttacacgatgaatctgtgcgcggcgaaggaggatatccgcaagttctctaaggagatgatcgcggacgatctgcgccggatggagtacacgccggggaattactacaattttcatccgggttcccatgtcggacagggggcggatgccggaatcgaatggattgcggaggcacttaacgaggtgctcacgccggagcagacgacgacggttctccttgagacgatggcgggaaaaggcagtgaggtgggaagaagctttgaggaactgcgcgcgattattgaccgtgtagagctgtccgataagcttggcatctgtctggatacctgtcatgtctgggatgctggatatgatattgcgggagatctggatggtgtcctggaggaatttgaccatgtgatcggtctgaaccgcctgtgcgcggtacattttaacgacagcatgaacgaccgcggttcgcacaaagaccgccatgcctgcatcggcgagggaaagatcgggctggatgcgatgcggcgtgtggcgacgcatccgctgctttcggacaagccgtttattctggagactccgaatgacgatgagggataccgcagagagattgcacttttccgggagtggagggagtagataagaatccagagaaatacattgctttttagaagtgtgtgtgttatacttcaaatcacatgaatgcgaaagctttttcatgcaaatatttgcccaccaagagattggttaagcccatacggacaggcggggcagctgccgatggtggagagatccacgttattgattgagttagaagctcaaattttataagttgatgacgactgcaggcgaaggactgcaggaccctgaatcgtatgcgatagagatatcacttgtgaaacggtcaataagagtagtaatagcaaatatttgctggcgaagatgccaacgtagactctgataatagtttttgcagcatgtaggacagattacataaagtatgactatgagaatgtgacaaggcaggtgatgtgtgcgcagcatacaggcatctgtctttttttgtggaataggaaacttcgtccctattacataaaaacgctccgggcaggattctttcttgtgctacagaagatgccgtgttatgcgaaagcatgaaagtcatgcttcctgtagagccaaaagctctgccggacggcatgcgtactgcggcagggagcatcaaaacagaatgtgaggagaatcatggaagcaggatcccagaagcgcgctccggtctacgaagcgctggaacaattaaaaaagagaagagtcgttcctttcgatgtgccggggcacaagagagggcgtggcaacccggagctcgtggaacttctgggggagaaatgtgtgagtctggatgtgaattccatgaagccgcttgacaacctgtgccatccggtgtcggttatcaaagaggcggaggaactggcggcggaggctttccgggcagatcacgcgttttttatggtgggaggaacaacgtcctccgtgcagagcatggtgttgtcggtctgtcgtgccggggataagatcatcctgccgcgcaatgtacataagagtgtgatcaatgcactggtactctgcggcgctattccggtctatgtgaatccggaggtggacaaaaagcttggcatttcactcggtatggagatctcggaggtggagcgggcgattctggagaatccgggcgcggtggcggttcttgtgaacaatccgacttattacggaatctgttccgatctgcgctccatcgtgaagctggcacatgaacacgagatgcttgtgcttgtggatgaagcgcacggcacccatctgtatttcggggaggatcttccggtctgcgcgatggatgccggtgcggatatggcgtccgtttccatgcacaaatccggaggaagcttaacacagagttccctgcttttaaccggcaaaaatgtcaactgggagtatgtcagccagattatcaacctcacacagacgacaagcgcgtcttatcttctgatgtcaagtctcgacatctcgcggagaaatctggcgctgcgcggaagggaatcgttccgcaaagtggcggagatggcggaatacgccagggcggagatcaacgacatcggcggatattatgcttacggcaaggatatggtgaacggcggaagcgtctatgactttgatgtgacgaagctctcagtctatacgcggggaatcggtctggcaggaatcgaggtctatgatctgttgcgggatgagtacgatatccagattgagctgggggacattgccaacatcttagcctacatttcaatcggcgaccgcatccaggatatcgagcggctggtgggagcgttggcagacgtcaaacgcttgtattccaaggatcctgcacagatgttaaatacagaatatataaatccgactgttcttgtttcaccgcaggcggctttttacgcagagaaaaaatgtatgccgatccgggagacggcaggaaagatctgcggagagtttgtgatgtgctatccgccgggaattccgattctcgcgccgggtgagatgattacgccggagatcatcgaatatatcatctatgccaaggagaagggctgctccatgcagggaacggaagatccggcggtggagcacttaaatgtcctggtggatgaccggcaggtgtggaaataagaccgccggaagaatagctcttaaggaagagcatacggtcaggaagaaccggcagaaggaagcagcagaccgtggaatacggtctggggaaggtggaagagagcgtggagttatggttttcggataatcagaccgatcatgtgaaggtgtcggtcaaagtggagaagcagctgttcggggagcagacggattttcagaggatcgacgtgtttgaatccagggaattcggcagatttttaagctccgacggcagcatcgtcttctcggaaaaggatgagttcatctacgatgagatgattgtgcatgtgccgatggcggtgcatccgcatgtgaaaaaagtgctggtcatcggtggcggagacggcggtgtggcgagagaactttcctattatgaggagatcgagcagatcgacgtcgtggaatccgaccggacattcgtggatgtgtgcaggaagtttttcccggacaacgcctgcggactggaagatccgcgcgtcaatatctattacgaggatggactgcgctttctgcgcacaaagcatgatgcctacgatctgatcatcaatgatgcgatcgatccgctcgggcatacggcgggattgttcaccaaggaattttatgggaactgttaccgcgcattaaaagaagacggcattatggtctaccagcacggcagtcctttttatgacgaggatgaggagtcctgccgcgtgatgcaccgcaaggcgagtcacagtttcccgatcagccgtgtgtatcaggcgcacattccgacctgttcctccgggtactggctgttcggatttgcgtcaaaaaaatatcacccgctaacggatctgaatgtggagcgctggaaagcgcgcgggatcaagacctggtattatacgaccaatcttcataagggagcgtttatgctgccaaaatatgtcgaggatatgcttgaggaagaggaaggcagaaggtaaatggcagatgcgggacagaacggactctgacgggacagtcagcggagcgttctgtcatccgttggcagaatgatataatagaaaatacagccgcaggacggcagaatgagaggataagtagatgggaagattattgattatcggatgtggcggagtagcaggggtggcaattcacaaatgctgccagaacagcaggactttttcggagatctgtattgcaagccgcacaaaagaaaaatgtgacgcgttaaaggaaaagctgcagggaacgacggatacagtgatcacgacagcgaaggtggatgcggataatgtggacgaactgatcgcactgatccgtgactacaagccggatgccgtgttaaatgtggcgctgccttaccaggatctgacgattatggatgcctgcctggcatgcaaggtggactacatcgataccgcgaactacgaaccggaagataccgacgacccggcgtggcgtgcaatttatgagaagcgctgcaaggaggcgggctttaccgcgtacttcgattattcctggcagtgggcatatcagaaacgctttacagatgccggcatcacggcgcttcttggcagcggctttgacccgggcgtgacgagcgtgtttaccgcctatgcgctgaagcattatttcgatgagatcgagtacatcgatatcttagactgcaacggtggagaccacggttatccgttcgccaccaatttcaacccggagatcaacctccgcgaggtatccgcaaacggctcctactgggaggacggacactgggtagagacaaaaccgatggaaattaaaagagaatataatttcccacaggttggcgagaaagacatgtatctgcttcatcatgaggagatcgagtctctggcaaagaatgtgccgggagtcaagcgcatccgcttcttcatgaccttcggtcagagctatctgacccatatgcagtgtctggaggatgtcggaatgctctccacttccccgatccagtatgagggaagagagatcgtgccgatccagttcttaaaggcattgcttccggacccggcgtcactgggtcctagaaccgttggcaagacgaacatcggctgtatttttaccggcaagaaggatggcaaggaaaagacgatctatatctataacgtctgcgatcaccaggagtgctacagggaggttggctcacaggcgatctcctacacgacaggagttccggcaatgatcggtgcagcgcttgttgtagataaggtgtgggataaggacggcgttttcaatatcgaggagtttgatccggatccgtttatggatatgctcaaccagtacggactgccgtgggttgtcgatgagaaccccaagacggtggcgtagccgttcgtaaaaagagccggacagggagagacgagagcaatgaagtggaatgaacttccgacaccatgctatgtggtggatcagaaaaaattaaaagaaaatttaataatattgcataatctggagcaggatacgggatgccatgtcctgctggcgcagaaagcgttttccacatatgcgctctatccgttgatcggacaatacatcagcggtaccacagcgagcggactctacgaggcgcgtctcggcgcagaggagatggggcgtgagaaccatgtgtttgctccggcgtacaaggacagcgatatggaggaactggtcacgctctgcgaccatgtgatttttaattcctttgcgcagtatgtcaggcacaggaagaaggtggcagcgcggaatgctgtcagtgatacaagtcaccgtgtcagcatcggacttcggatcaatccggagtattccacgcaggagggacatgcgatctatgatccctgcgctcccggttcgagactcggcatgacaagagaggcgtttgagaaaggacttgccggacttggcatgagacggcaggaggatggaagctatgaactgccggaggatgtggagggactccattttcacacgctctgcgagcaggacgcggatgatctggaatgcacgttttatgcgtttgaggagcagtttgcttcttatttaaaacaggtccggtggctgaatctgggcggaggacatcatatcaccagaccggggtaccagatagggcgcttaaagaagctcatcggctatatcagggagaactacggacttgccgtgtatctggagccaggcgaggcggttgccttaaatgcgggatatctggtgacggaggtgtgcgatattgtacacaacgggatggatattttgattctggatgcgtccgcggcgtgtcatatgccggacgttctcgagatgccgtatcgtccgccgcttcgggacggatttgcggcgggggaacagaaatacacctaccggctgtcctcgctcacctgtctggcgggggatgtcatcggggattacagttttgcacacgagattcagatcggcgaccgtctggtgtttgaggatatggcaatctactcgatggtgaagaataatacctttaatggaattccgcttccgtcgatcgcacttctcatggaggacggggaggttgagatgttaaagcagttcggctatgaagatttcaaagggcggttgtcataaccggttttgaaagacatccgggacaagggaagatgacttggatgagggtagaggaaatggagaaaaagatgcaaaagtgtgcagaagatccaaaagagagaatgacaacgccgcaggcggacggattttttatgccgggggagtacgaaccgcatgacggctgcattctgatctggccgtcgcgcccgggttcctggatttacggcgcacgcgatgcgcggattgcattccgggatgtgattgcagcgattgcgcagagtgaaaacgtatatgtggcagccgggcgggatgccattgactccgcgcgagagatgctgatcggtgaggacgcgccgtggaaaaagcgggtgacggtctttgaactggagacagacgatgcctgggcaagagatgtggcgccgacctttgtgaaagacggcgccggcaggatgcgggcagtgaattggtcatttaacgcctggggaggatcggtggacggactgtatgcatcctgggcgttggacgatgcgtttgcaaaggcgtttgccgcaaagtatggctatgcgtgttacgatgccgcgccgtttgtactggagggcggatcgattcacagcgacggtgaggggacgcttctggtgacggaggcgtgccttttgagcgcggggcgcaatccggggcttacgcgcgaggagatcgaggagaagcttagaacttatcttggcatagaaaaagtgctgtggctgccgcgtggaatctatcaggatgagacgaacgaacatgtggataacgtctgcgcgttcctgcgcccgggcgaggtggtgcttgcatggacggacgatgaaacagatccccagtatccgctatcacagcagacgcttgcgtacctggagggcgagacggatgcgcgcggaagaaagcttgtcattcacaagcttccgattcccgatcatccggtctgcattacagaggaggaactggcaggttattcgtttgccgaaggggaggatgagcgggaggcgggagagcgtcttgcggcatcctacgtgaacttttatttttccaatgaggcagttattcttccggcgttcggcggggagaatgaggagagtgacaggcgcgctgccgcactgcttgcgcagtggaatccggggcggaagattatttcggtgcaggcgcgtgcaattttagtcggcggcgggaatatccactgtattacacagcagatcccggcggcaaaaatgcagcagcaaaacgcagcagcaaaaatgtagcagcggtaaagtggacagagacaaaaagaggaaaagagcatgaacagagtgaaagtggcggcaattcagatgcgctgtgcggcgtctgtggaggagaatttaaaaaaggcggaagccatggtgcgaaaggcggcggcagagggagcaaacgtgatccttctgccggaactttttgagcgggaatatttttgccagcagcgccggtatgacttctatcattatgcaaagcctgtgatggagaacgatgcggtgcgcatgggcatgcggcttgccgcggagcttggtgtggtgctcccgatcagcttttatgagcgggatgtgaacaacctgtacaattccatcgcctgtatcgacgcggacggaacagtgctcggcgtttatcgcaagacgcatatcccggatgatcactactatcaggaaaagttctattttacgccgggggataccggatttcaggtattttctacgcgctacggcagaatcggcgtgggaatctgctgggatcagtggtttccggagagcgcgcgctgtatggcgcttgcaggggcggagctgcttttttatccgacggcgatcggatcggaaccgatcttagagtgcgacagtatgccgcactggagacgctgtatgcagggacatgcggcagccaatctgatgcccgttgttgcggcaaaccggatcggggaggagacggtagaaccctgtgaggaaaacggcggacagcgttcggcgcttgttttttacggatcgtctttcctgaccgatgagaccggagaaattctggcggaggcagggcgcgacgaggaagagatactggtgcaggaatatgacctggacgagctggatgccagacggctggagtgggggctgttccgcgacaggcgcccggagtgctacggcatcatcagcggcaggtaaaagaaatatattgttgacatggaaacaataatgagatacagtaggaactgggaacaaaataccatgttagaaaaaggaagagtctgcatgaaagatcgggaagagctgttaaaagaaatcgcgctcatgctggagcggcaggatatgctttccaaactgacggaaaaccagtgtctggatgaatacggctattcggagacacactgtatcgactatatcggaagactggaactgccgaacgtcacgaaggtggcggagcacatggggatgacgcgcggcgcgatcagcaagatgaccaagaagcttcttgccaaagggctgatcgaaaaatatacgctggagacgaacaaaaaggaagtatatttcaagctcacggatcagggcaggcttttgtttgatgagcatgcgaagcggcatcagcgatgggagaagcgcgatatggaatttctggcgcgctattccgtcgaggatgtgaggacggtgagccgttttatgacggagttcaacggctatctggaagagcagatcgagacgattacagggacgcaggcagaaggatgatattgtgtaataggaacgaagtttcctgttacacaaaaaagaatcctgcaggcaggattctcatgtgttactgttgtatgaaatgtaattgttaagcgtttaacacttcaagaagcgtaagcagcttctctaccgtatcctggctgatgttgtttgccgcgataaaattgcttaccgtcgttgcaacatcttcggaagtctctgcagtggatgcggatgcaacggtgttcgtatcgcttcccatataggagagaaccttctggacataattctgtgtctcgctaaacggtggaataccgccgtatttatcgacatttgcactgccggcgttgtatgccgcaagcgcaagagaggtatcgccgttgtacttggcaagcagctgggagatcagattcgcaccgcccatgatattctggtaggcatcgtaggaatctgtgacaccgagagatgctgcggtggcaggcatcagctgcataataccgacagcaccggcgctgctgacagcgcttgtattaaaattggactctgctcttgcgattgattttaaaagagtggaggagacgccgtaggtgttcgccgcttcatcaaagatggcggaaaggtctccggagcaggtcgtgctgccggagtaggcgtcggtggcattcgttaaaacggaagaaaagtcagaacttgcagcctgcgcttttgcagcttcggcggcagctctctccgcttcagcgcgggcagcagcttcggcgttgatctgatccacaaatgcctgatcgtgataatttaagatcgtaatactcattggtaactcccttgaaaacaacttcactgaatgtataactagaaaaagtatagcataatttgcgggattaggaaagaaaaaaatgaaaaccaaacaagtcgagcggaaaggaacatatttacgtgcatttcgggcagcgtttccctgcacggtaccggtgctcaccggctatctgtttatcgggatggcgttcggagtgatgatacaggaaaaaggttacaacttcttgtgggcgatgctcatgagtctggtgatctatgcgggcagcggacagtatcttgcagtcaactttttcgcgccgggcgtcagcctcctcaatgtgattttcatggaatttatggtgaatatccgccatattttttatggactgtcactgctggaacgattttctaagatggggaaaaagcggctttacatgatcttttccctgacggatgagacctactcgcttttcttcgtcacaaaagtgccgaaagatgtgaaggaggagcagttcttgtttgcgattgccgtgctcgaccagagttactggatcatcggctccggcatcggcgccctgcttggaaatgtgctcccgttctccacggagggcattgactttgcaatgacggcattgtttgtggtaatcatggtggaacagtggatggagaagcagaaccgtccgagcgtggtgatcgggctggtatgtggactggtgtgcaggctggtgttcggagcggacaattttatccttccgaccatgatatgcgtcatggtcatcctgctttcttgcaaaaaaatattcgataaaatgattccggaggacggaaaggaaggaggcgagccggagtgccagtaagtgttggaagatcgcttgcgatcatatttaccgtggcgggaacgatattttttaccaggctgattccgtttctgtttttcccgaaaggaaaagagattccgccgatcatccggtatctggggagagtgctacccccggcggtcatcggaatgctggtgatctactgcctgaaaaacgtgtcggtgcttgcggcgcctttcggcctgccggaatttattgccgtggcggcggtcatcatgcttcatgtatggaagcgcaacaatctgctcagcattggtgccggaacggcactttatatgtttttgatacaagtcgtattctaggaagaaaggaagaaccgtatgaagaagaaaccatttgtaaccaaagaacagttagaggaaatcgtaaaaaaatacccaacgccttttcatctctacgatgaaaaaggaatccgcgaaaatgcgaaggcagtgaaggaagcatttgcatggaacccgggattccgggagtattttgcggtaaaggcaacgccgaacccgttcattcttgacattttaaaagaatatgactgcggatgtgactgtgcgtcgctgacagagctgatgcttgcggattcccagggcttcgatggaaaacacatcatgttttcctccaatgatacgccggcggaggaatttgcatttgccaatgagcttggtgcgatcattaatctcgacgattttacacacattgattttctggaaaaaacgatcggcaggattccggagacgatcagctgccggtacaatccgggaggcgtctttaagatgagcaacggcatcatggataatccgggcgatgcaaagtacggttttacccacgagcagatcattgagggattcaagatcttaaaggagaagggagccaagcattttggcgtacatgcgtttcttgccagcaataccgtgacaaacgaatattacccgaagcttgcgagagaactgtttgaactggttgtggaactgcgcgataagacgggatgcgatatccgttttatcaatctctccggcggtgtcggtattccgtacacaccggatcagacgccgaacgacatccgtgtcatcggagagggcgtccgggtggcatatgaggagatcttagttccggcgggacttggcgatgtcgcaatctacacggagatgggacgttttatgctgggaccgtacggctgcctggtgacaacggccatccatgagaagcatacccacaaggagtacatcggtgtggacgcgtgtgccgtgaacctgatgcgcccggcaatttacggggcatatcaccatattacggtgatgggcaaggaggatgcgccgtgcgaccacaagtatgatgtgacaggctcactttgcgagaattgcgataagtttgcgattgaccggatgctgccgaagatcgacatgggagatcttctggtgattcatgataccggtgcgcatggtttttccatgggatacaactataacggaaaattaaagtcagcggaggtgctgctgaaggaagacggatcgacacagctgatccgtcgtgccgagacgccggaggactatttccgcacgtttgactgctttgatatcttaaaggatatgaagcacccgaaataagcggcagatcattccggaaaaagcacagcagcgaggatgagatatgtgcattgatacagaacgttttgagcgtgccaggggcagagtcattggaatcgagcggcagaggcttggaatcggcacactctcggagaagacggtacatgcagtgctcaagaattattatgcaccggatgaggatatgcatgagatcccgattgagaattttgttgcggatatttttgacggggaggcagtgatcgagattcagacgcggtcgttccagaatatgcggcggaaacttgccgcatttctgccgttgtacccggtgaccatcgtctatccgattccgcatgtgaagtggcttcactggatggatgaggagacgggggagatctctcccgggcgcaaatcgcccaagaagggaaatgcataccaggcattcatcgaattgtataagatccggccgtttctgaaagatccgaatctgagactacggctggatctcattgacatggaggaataccgtctgttaaacggctggagccgggacaaaaagaagggaagcgaccgcttcgaccggataccgcttaccttcgtggaggaagtgcgtgtggaccggagggaggactacatgcagttcatcccctatgagattccggaggagtttactgcaaaggattttgcggcatgcgcgaagattccggtgcggctggcacagacggtgctcctgctcctgacggatctattgattgtggagcggattggaaagcagggaagaagttatctctaccggatctgcgagattgaatgaatctcttcccaagcggggcgttctgtgttatactgactgccggatgtatatttatgcagtatctatgtgagagataaggaagcatgaggtagatagtacgatgaaaaacacagcaatcaaattatccggcatactgcttgccggagcggtctttttttcgacgctgttaggttacggcacacaggttgccgcggcgacggcgataggcagcgacacggaggcgggacaggcatccggcgacggttctgttacgtcggttgcggatcttccgggaaagcatatcggtgtacagctcggcacgaccggagatatcatggtcagcgactatgagacggacggctcgggcacggtagtagagcgttacaataagggcgcggatgccgtgcaggcattaaagcagggaaagttagactgcgtgattattgacgaattgccggcgctggcatttgtggagcagaacgaagggcttaagattctcgaggagaactttgttgaggaggactatgcgttcgtaatcgcaaagggtaacgaggcacttgtggatcaggtcaatgagacgctgcgcgaactgaaggacgagggtgttctcgatagcattgcgaagaattataccggaacggacgaggagattggaaagtatccgtatgaaattctggatgtggaacgcacgaacggcacgcttaccgttggtacgaatgcggagtttccgccgtatgaatactatgaagagggaaagatcaccggaatcgacatggatattatgcaggcggtctgcgacaaactcggcatggagttaaagatcgaggacatggcgtttgattccgtgattcctgcggtgtccaccggaaaagtcgacatcggtgcatcgggttttacggtgacggaggaacgcaaaaagaatgtgaatttcacggatacctatgcaaaatccaagcaggtcatcatcgtgagagatacatctgtcacagcagagaagacagggatagcagagaagttttatgataactttatcaaggacagccgatatacctatttgttaaagggacttttaaatacactcatcatcaccgtgtttgcggtaatgatcggtattgtgtttggatttttgatcgcgattgtaagaaccaaccacgacagaaacggcgggcttacgatcttaaatgcactctgcaaggcataccttgccgttgtgcgcggtacgccggtcatgattcagcttctgattatttattatgtcattttccagagcgtcaatacgggaaaactgttcgtggcagtcattgcgttcggactgaactcggcggcctacgtggcggaaatcgtccggtccggtattatggcggtggacatcggacagtttgaggcgggaagaagccttggattaaattataagcagacgatgttaagcatcatcctgccgcaggcagtcaaaaatattctgccggcactctgcaatgagtttatcagtctgttgaaggagacttcgatcagcggttacatcgggctgatggatctgaccaagggcggagacatcatccgaagcgtgacgtacgaggcgttcatgccgttaattgcggtcgcggccatttatttcctgattgtcatgggactgagcaaggcagtcggactgttggaaaggagattgagaagcaatgagcgataatacggtaattctggaagtaaaagagcttcacaagtcttttgacggtcatgaagtgttaaaaggaatctcgacgacgatcaaaaagggcgatgtgctggcgctgatcggaccgtccggctgtggtaaatccacgtttttgcgctccttaaatctgctggagattccgacggcgggacatgtgctgtttgagggaaccgatctgacggatccgtcggtggacatcaatcatgtccgggagaagatcggcatggtgtttcagcagttcaatctgtttccgaacatgacgattctggaaaatatcatgcttgccccggtaaaactcggcaagatgacaaaagaggaagcgaatacgcgcgcgatggagctgttaaagcgcatcggtctggcggataaggcgggcgcgtatcccgcgcagctttccggcggacagaagcagcgcattgccatcgtgcggtcgctggcgatggacccggacatcatcctgtttgacgagccgacctcggcgcttgatccggagatggtcggcgaggtgctcgccgtgatgcaggaactggcggaggatggcatgacgatggtggtcgtgacacatgagatgggatttgccagagaagttgcgaaccgtgtgatgttcatcaacgacggcgtgattcaggaggagggaatcccgcaggagatttttggcaatccaaagagccagagactgcaggagtttttatcaaaggtattgtaagaagaaataaggacgggctgtccggcgcaaaagaggtgccgcggcccgttttttgtgcaacaggcaaagaatgtgttttgtatactgcatcaggaatacctcccgcaggcggagagcggggcggaacatcgtttgcaagatgtgcgattgtatgataagataaataacgatttttaggaacggaatcgtaagggaaggaagaacgcatatgaaatggaataaatacacgatagagacaacgacggcggcggaggactacatgagtgcgatgttagccgaccttggcattgagggagtggagattgaggataacattccgctgtccaaggaagatcaagcggatatgttcatcgattttctgccggagcttccgccggatgacggtgtgagccacgtcagcttttatctcgaggatgacggcgaggaccgcaccgaactgttaaagcaggtaaaagaggcgttggaggacttaagaaaagtcgtggatgtcggaagtggcgtggtcacctccgaccagacggaggatctggactggatcaacaactggaagaaattcttcagttccttctatatcgatgacatcctgatcaaaccgacctgggaggaattaaagccggaggatgccgacaaatttttaatcgagattgatccgggtgtgtcgtttggaaccggcaagcatgaaacgacgcagctgtgcatccgccagctgttaaagtatatccgcgggaacgatgcgtacacaccggaaaaccgcacgccgaaggtactcgacgtcggctgcggaagcggcattttatcgattgtagcgttgaagcttggcgcgtccgcggtagtcggaacggatctcgatccggactgcatgacctccacacatgagaatatggaagtgaaccatctcgatccttcgcttggcacattttatgtcggcaatctgatcgatgatgcagcactgcaggagaaagtcggcacggaggaatacgacattgtggttgccaacattctggcagacgtcattattccgatggcaccggtgattccggcacgcttgaaacgcggcggttattttattacctcgggcatcatcgatttcaaggagaacgcggtaaaagaagcgatcgaagcggccggacttacggtggtggagatcaatcatcagggcgagtgggtgaacattacggcgagaaagccggaataaggaagacgatccgaaaaaaggaagatgatccgaaggaatggcaggcagcccggaaatgaggagtttatgtatcagttttttgtggaagacgagcagattgcaaatgatctggtgataattgagggaagcgatgtaaatcacatccgcaatgtcctgcgcatgaaatgcggggaaaaagtgcgcatcagcagcacatccggcaggaatttcttcggcacgattgaccggatcgcagagaacgtggtggaggtgtgcatcacggaggagacggctttagatacggaactgccctgccggatctgcctgtttcagggacttccaaagagcgacaagatggagctcatcgtccagaaggcagtggagcttggcgctgcggaggtgatcccggtggcgatgaagaactgcgtcgtaaaactggatgcaaaaaaagcggcggcaaagacggcgcgctggcaggagattgcaaagagtgcggcaaaacagtcaaagcgcagcagaattccggtggtgagagaaccggtgaattaccgggaggcagtcgcattggcgggagaactcgacgtggtgctgctgccgtatgagaatgagcgcggcatggcggccacaagggaagtgatggagcggattgcaccggggcagagcgtcggcatttttatcggaccggagggcggattcgatccgtcggagattgcgctggcaaaagaggaggggatgcatctggtgtccctcggaaaaagaattttgcgcacggagacagcgggacttgcaaccctttctattctgatgtatcatatcgagagtgtgtcggaagcggaagaagagcgggatcagccgtgattctgcgtcggcgtttgttagaaaggcatggttttaaaacagatggaagcatatttggataattctgccaccacccggtgcagtgagcgcgccaaaaacaagatggtgcagatcttaacggaagattatggcaatccgtcctccctacacaacatgggaaagacggcggaggactatattaaagaagcaaaagagcagatcgcgaagacgctccgctgtgacgagaaggagatcatctttacgtcgggtggcacggagtcgaacaatatggcgctgatcggcggagcactggcaaacaagcgccagggaaagcatatcatcacgacagcgattgagcatgcgtcggtacaggcgccgcttgcctacttaaaagaactcggctatgagatcacggaattgtctgtggatcatgacggtattatttcgctggaggaactgcgggatgcagtgcgggaagatacggtgctggtgtccatcatgatggtgaacaacgagattggtgcggttgaaccggtcgaggaagcggcgaaggtcatcaaggcgaagaatccggacacgctgtttcatgtggatgcgattcaggcgtacggcaaattccgcatctgcccgaaaaagatggggattgatctactctcggtgagtggacacaagatccacgcgccgaaaggaaccggatttttatatatccgcgacaaggtaaaagtaaaaccgatcatctacggcggcggtcagcagaagggaatgcgctccggcacggagaatgttccgggcgtggctgcactcggcgaggcagcggcggagatctatgagaactttgacgcgaagatcggtcatatgtatgagatcaagcagaggttcatcgatgaggtgacacagatcccgggagtgacggtaaacggtaaaacgggacgggactctgcgccgcagattgtgagtgtcacgatcgaggatgtgcgcagtgaagtgatgctccattctctggaagaatacggcatctatgtgtcggcgggaagcgcatgctcgtccaataagccggcaccgagccgcaccttgcagggcatcggtctgccgaagcagaagttagagtccacgatccggatcagcttctgcgtcaacacaacggaagaagaagtggattacgcggtcgaaaaaatgaaagagatcattccgttccgcagaaagttcaccagaaagtaaaggagaaaaccatgacatataaagcatttttgattaaatatgcagagattgccatcaagggaaagaaccgctacctgtttgaggatgctctggtgagccagatgaatcatgccttaaagaaggtggacggcacgttccatatccgcaaggagcagggcagaatctatgtagagatggagggcgaatacgattacgatggagctgtggaggcactgcagcatgtgtttggcatcgtgggaatctgtccggtcgtactgctggaggacgagggctttgatgcgctggcgggggaagtcatccgctatatcgacgaggtatacccggacaagcattttacgttcaaggtcaatgcgcgccgcgcgagaaagaattacccgttggagtcgatggagatcaatgcccagatgggcgagcggatcttagaggcgttccccgagacgagcgtggatgtccacaagccgcaggtgatgtttaatatcgagatccgcaaccagatcaatgtgtactcgacggtcattccgggaccgggcggtatgccggtcggaacaaacggaaaagccatgttgctcttatccggcggaatcgacagcccggtggcaggctacatgattgcaaagcgcggtgttaccatcgatgcgacctattttcatgcgccgccttatacgtcggagcgcgccaagcagaaggtcgtggatctggcaaagatcatttccaaatataccggaccgatcaatctgcatgtggtcaattttacggatatccagttatatatttacgaacagtgtccgcatgaggaactgacgattatcatgcggcgctacatgatgaagctggcggagcattttgcaaaagagaacaagtgtctcggactgattacgggggagagtatcggacaggtggcgagccagaccatgcagtcgctcgcggcaaccaatgaggtatgtacgatgccggtttaccgtccgctgatcggatttgacaagcaggagatcgtggagatctcggagaagatcgacgcttatgagacctccatccttccttacgaggactgctgtacgattttcgtggcaaagcacccggtgacaaagccgagcttaaacgtgattcacaatgatgagagaaagctttccgagaagatcgatgcgctgatgcaggaagccatcgatacggtggaggtaattcacatcgaggcgtagatgtgcatcctcgcggtgcgggtttatgtaataggaacgaagtctcctgttacataaaaaaacagccgcgggaaatcccgcggcgtgtacccctgttatgtatgaattagattaagtatggctttaaagtctccataatctcgtccatgttgttctctgcatggattgcaaggtcgataggcttggataaatctaaactgaagatacccatgatggactttgcatcgatgacgtatctgccagagatcagatcaaaatcatattcatactgcgtaattgcattgacgaaggactttaccttgtcgatcgagttaagggaaatctgtactgttttcatgataaaaaacctccttaggattatctgtttcaagatagttttatagtaatagtttttcgtggaaaagtcaacacaaaaagcggatgaaaccataagaaagcgtgaacaaaaagcaatacagaaatgaggaaacaagaatgaaagcagcattgcataatttgggttgtaaagtgaatgcatatgagacggaagccatgcagcagattttggaggaggcgggatatgagatcgtgccgttttcggagtatgcggatgtctatgtgatcaatacatgctccgtgaccaatatggcggaccgcaagtccagacagatgctgcaccgggcgaaaaagcagaatccggatgcgattgtcgtgggagccggatgctatgtgcagaccaaggaggcacaggctctcgtggatgagtcgattgacatcgtgatcgggaataataaaaagcatgagctggtgccgctgcttcgggaatacgaagcatcccaccgcaagatggcgtgtgtggcggacatcaatcacgagaagcaggcatacgaggaattgtcgctttcgcgcacggcagagcacacccgggcgtttatcaaggtgcaggatggctgcaatcagttctgcacatactgtattattccgtttgcgagagggcgtgtcagaagcagggagcttccggacgtcttacaggagatacggacgctggcaaaaagcggctaccgcgaggtggtgctcaccggaatccatctgagttcctacggtgtggacaacggggagtcgctgctgcatctgatcgaggcggtacatgagctggaggggatcgagcggatccgcttgggaagcctggaaccgcgtatcgtgacggacgcgtttgcaaaaagactctcggagctgccgaagatctgcccgcattttcacctgtcattgcagagcggctgtgatacggtgttaagccgcatgaaccggcggtacgatacggcggaatatgaggtgggctgtgcgctgctgcgcaggtattttgaacatccggcaatcacaacggatgtcattgtaggattcccgggggagacggacgaggaatttgagacgacggagcgttatctggagcggattcatttctatgagatgcatattttccagtattcgagaagagagggaacgaaggcggcggcaatgccggatcaggtgccggaggcggtaaaaaaggagcgcagcgaaaaactgctggcactcggtcacaggatgtcggaggagttccgccggtattatctcggcagacaggtgacggcacttctggaggaagagtttttatatgatggaaagcgttactacaccgggtacacaaaagagtatgtgaaagtggcggtggagacagaaaaagatctttccaacacgtttgtgacgggcaccttaaagacacaattaacagaagacatctatcttttagttgaattttaagacaaactatattagaataaaaacagcaatgctttttcgacaagagagcggtggctggcagcaccgctttaaagtccgggcagatataagggcgtgacaaatatgcaggagatcaataacacacaatattttaaagtggaaaaaggaccggaacttcgcgtgagcgacgtgctcgcgattgtttatcgtgcgcttatggagaagggatacaatccggtgaatcagattgttggatatattatgtcgggagatcctacttatatcaccagtcataataatgcaagaagcctgatcatgaaagtagaacgtgatgagctggtagaggagatgctgaaggcttacatcaggaataacaactgggaatagaagatgcggatattaggtttggattttggctcgaagactgtcggtgtggcagtcagtgatgaacttatgttgacggcgcagggactggagatcgtgagaagacagtctccgaacaagctgcgtcagacgctggcaagaatagaacagattgtaacagaatatcaggtggagcgcattgtgctcggctatcccaagaatatgaacaataccgagggagagcgttgcgagaagacgaaagagtttgcacagatgctggagcgccgcaccgggctttctgtcgtcctgtgggatgagagacttacgacggttgcagcagaccggcacatgatggagagtggaatacgcagagagaatcgcaaacagtatgtggatgagatcgcggcagtgtttattctgcagggatatctggattcactcgcgtttcagaaacattgaatggagtaaatatggaaaaagtaaagtttgtggatccggacaccggagaatcgctcgcgtttttcgtggttgaggagacaaaggttggcggcacgcactaccttctggcgacggaagaggaagacggcgactgtgatgcgtatattttaaaagaggtggaaacgaaagacgaggaatctgtctacgtgcttgtggaagacgacacggagctttctgccatcggaaaagtgtttgcagagctgctcgacgacgcggacattgcattttaagagacaaataataatggaggtaatattttgaaaaaagaaaaaaaagagaatagtggaaagctcaaaatcattccgttaggaggattggagcagattggtatgaacattactgcctttgaatatgaggacagtattattgttgtggactgcggtctgtcttttccggaggatgacatgtacggaatcgatctggtcatcccggatatcacctatctgaaggacaacattgacaaagtcaagggattttttatcacacacggtcatgaggaccacatcggagcaatcccttatgtgttaagagagatcaatgtgccgatctattccaccaagctgacgaacggtatcattgagcacaagttaagagagcacaatatgctcaccaaggtaaagcgcaaggttgtaaaatacggacagcatatcaatctcggctgcttccgcgtggaattcatcaagacgaaccacagtattcaggatgcggcggcgctcgcaatctactccccggcaggtattattgtgcacaccggagacttcaaggtggattacacaccggtattcggagatgccatcgatctgcagcgtttcggtgagatcggaagaaaaggtgtgctggcgctgatgtgcgacagtacgaacgctgagcgcccgggatttaccatgtcggagaagacggtcggtaagacctttgatgagattttcgcagacaataagaatcaccggatcatcattgcaacctttgcgtccaatgtcgaccgtgtgcagcagatcatcaatacagcgtacaagaacggtcgtaaagtggtggttgagggacgaagcatggtcaacattatcggaattgcttccgaacttggatatatcagtattccggacaatacgttaatcgacattgaggagctgaagcgctacccggatgagcagaccgtcatcatcacgacgggaagccagggtgaggcgatggcagcgctttcccgcatggcaagcggcgtgcacaagaaagtgacgatcaagccgaacgatacgattgttcttagttccaacccgattccgggaaatgaaaaagcagtatcgcgcattatcaacgaactgtcgatgaagggcgccaatgtaatcttccaggatgtccatgtttccggacatgcctgccaggaggagatcaagctgatctattccttggtgaagccgaagtatgcgattccggtgcacggcgagtaccgccatctgatcgcgcaggcgaaggtcgcagaggaactgggaattccgaaagagaacattttcctgctctcctccggagatgtgcttgagctaaacgacgaggctgcggcagtgacaggacgcgtacacaccggagctatcatggtagacggtctcggcgtcggcgacgtcggcaatatcgtgctgcgtgaccgccagcatctggcagaggacggtatcattatcgtcgtgctgacactggagggcggttccggacaggtgcttgccggaccggatatcgtatcgcgcggattcgtctatgtccgcggtgcagagggactgatggacgacgccaagcacctgcttgacgatacaatgcagcactgtatggataaaggcattacagactggggcaagattaagacggagatcaaggattctctgggagattttgtatggaaagagacgaagagacgcccgatgattatgccgataattatggaagtgtagaagattatgaaatggaacaaagtcgttttcaaatttgtcagtatcagcttttccatcctggtcgcactgcttgttgtggtgggattgattgaacttggctcctactgctatgacttcggataccgggtgtttaccgagagcccggtggacgaagcgccgggcagggatgtgaccgtatccgtgacggcggatatgtcagagcatgatatcggaaagatgttaaaagaagagggactggtggaggatgcgaatctgttctatgcccagctgaagttatctgcttactccggaaaactcaaaccgggtgtttacacgttaaatacctcgatgaccgcgcgggagatgttcgtgatcatggcagcggatgccggtgatacggaaagtaccgaggacactgaggataccgcgaacaccggggcagaggatctgacagatgagacggacgatacacagaccgcagaagatgcaggggatgcagaggagacaccgtgatagtagatgagagacttgtgacctatatcaattctctggatacgggaaatactgcgatgctcgatcagattgagcgggaagcgacagccgattacgtgccgattattcggaaggagatgcagagctttttgaagtttctgcttgccatgaagaagccggcacgtattttagaagttgggactgcggtgggattttccgccatccttatggcggagtacgatcccgtgccgtgtcagattataacgatcgagaattacgaaaagcggattccgattgccagggagaattttaagagagccggaaaggaagcgcagattacgctgctggagggcgatgccgcggaagtgttaaagacgctggaaggtccgtatgattttatttttatggatgcggcaaaggggcagtacatccatttcctgccggagattctgcgtcttctggcgagggacggcgtgctggtgtcggacaatgtgctgcaggacggcgatgtgatcgaatcacggtttgcagttacaaggcggaaccgcacgattcataagcgcatgcgggaatatctgtacacgctgacgcacagtgaagaactggtgactgcggtgctcccggtgggagacggcatcaccttgagcacaaggcgctaaagatggcaggcatgcaggaatagagaggaacgagaatatgagaagaccggagttactgataccggcgagcagtctggaagtattaaaaattgctgtgatctacggagcggatgcagtatatatcgggggcgaagcgttcggactccgcgcgaaggcgaagaatttttccatggaagagatcagggaggggattgcttttgcacatgcccatgatgtgaaagtatacattaccgccaatatcctggcgcacaacggggatctcgacggtgtgagagagtattttgctgagcttcgggaaataaagccggatgcgctgatcatttccgatccgggggtctatatgattgccaaggaagtctgtcctgagattgagcgccatatcagtacgcaggcaaacaacaccaattacggtacctaccggttctggtatgagcagggggcaaagcgcgtggtgtcggcgagagagctgtcgctggctgagatcaaggaaatccgtgccaatattccggacgatcttgagatcgagacgttcattcacggggcaatgtgcatctcctactcgggaaggtgcttgctgtccaactattttaccggaagggatgccaaccagggggcgtgcacgcatccgtgccgctggaaatacgcggttgtggaggaaaaacgcccgggagaatacctgccggtctatgagaatgagcgcggtacttatattttcaattccaaggatctttgcatgatcgaacatattccggaattgatggagtcgggtattgacagttttaaaattgagggtagaatgaagacagcactgtatgttgccacggtggcgagaacgtatcgaagagccattgatgactacaagcagtcgccggagctttacagggagcatatggcgtggtatcaggagcagatttcaaattgtacctaccggcagtttacgaccggatttttcttcggcaaaccttcggacgaagcgcagatttatgataacaacacctacgtgaaggagtacacgtatctgggtattgtcggagagcagaacgaagagggactctaccgggtggaacagcgcaataagttttctgtcggggagagcatcgaggtcatgaagccggatggtgccaatatcacggtgactgtgcagcgaatcgtggatgaagaggggaatgatatggagtccgcaccgcatccgaagcaggtgctttatatcgaccttggacagccgcttgccatgtatgacattttgcgaagaaaagaataggatggtggaagacgatgaagcaggagaagtatgttgcatatgtaggaacttatacacacgagaacagcgtaggaatccatatctatgatgtagacgttgaggcgggaaaactgacggaacgtaaggtggttccgatcaacaatccgtcggatctggttgtctccaaggaccgcagatttctgtattccattgcggatgagggtgtggaatccttccgtattgagaaggacggcgatcttactccgatcaacaagcagtggatcggcggaatgagaggctgctatgtggaagtggatgacggcaaccgctatcttttcgtgggcggacatcatgacggccgtgtgagcatgatgcatctggaagcggacggaagcatcggcgggatcgcggacggtattttccacaaaggaatcggaagaagcattgcacagcgcaacttcgtaccgcatgtggactgcgtgaagctgacgccggaccagaagtttctgtgtgcggttgacaacggactggatcaggtaaaagtctaccgcgtggattatgagaacggtaagctggagctcatcgacattatccgtggaccgctcgagtctgcaccgcgtatgatccgtttctccagaaacggcgaatatgcatacattctctatgaactgctcaacatcgtggaggtatatcattattctgtgcaggataatgagccggtatttgagaagatccagaccatcagcacttccccgaagaaggaggaggatacttgtgcggcatcgggtatggagatctcgaagagcggtaagtatctgttctgcagcaatgcaggcgtgaactctgtcgtgtgctatgagatcgaggagaagacgggaatgctcaccccggtatttacgacgaaggtgaacagcgattacccgaagatgcttgccatctatccggatgagaagcattatctgacactgaacaacaattccaacgatattttcagctacacgatcgattacaaggacggttattcgcttgagaccggttccccggtgaaggtagacaagccgaactgcatctatatgctgaagcttgaggtggaataagcaaataaagtgcgaatcaggaactgccgcaataagcatatcgttctttggacgataagtaatattacaagaaacacacttgaggatttcatgtggaaatgcagatggaatattcgttggagaaaaatgtgagcatttcttccagctgaatgtttgcatcggattccgtgtctcttccacgtttggacaatctgacgggcgcatgcccgacacaccggagacaatgggcggactttctggtgtccctaatggcatctcttcacagacaatataaaaccgcgcgaaccgaaactcgccggcatctgctattgaaaataaggcagatgccgactcagacatcggcttcgcgcggttatgtttgaagtgctatactgaattttcggctttaatggtaattagtttcatagtgtatatttaatgctccttgtaagatactaactgcattctacatctaagaataaggataggcaagattatcgtttacaaaagcattctggtgatttgacatgaaaataggaacaaaaacaagaatttttccacacataaaatgaatcatatttctataataaatgtcaagaaagagagggcagatcaatgaaaacagacgcacgagttcgctacacagtacatatgattcagaatgtttttctggaacttctaaaagagaaaccagttgccaagattacggtaaaggaaatctgtgaacatgcagaaatcaatcgcagcacgttttataaacactatcaggatgtgtatgatcttatggaaaaactggagaatgaagccgtagaggcatttgaaaaattattggattcctatgtacagaacgaaactgtaccggcattagtcactctgctgacctcactccgagaaaatcgagaacttcttttgccgttgcttgcaaattcttcgaatgatgattttatgaaacggcttacggatgcctgttccggatatgcgttatctcacctcacaccggaggcggactatacgagtaatccaaaacaggcggccgtctatgcttatcttgcaggaggaacatcaggaatcatcagcaattggctggaaaccggtacacaggagcctccgcagcaggttgccgaattgattcagtcgttgaatgaaaccgtgttgacggtattggttccctgaagttttccaatttccttcaaccatgcaatctcatctcgaatcgtctcatggaaaggtctggtcttgtagccaagatctttttttgcttttgaggagtcgaaagcattatttcttgacagattataaatcatgtattttgtaagtgcaggtgtggagcccttcttctgcgcctgcttttccaatatatttgcaacgaaagaagccagtggaagaggaaggaagaagagcggacgtttgcagcgaccttcttttgcaacaatgtttgcaaattccggataagtaatgacttcatttgccagaatatagctctctccggattttccattttctactgccaggatgactgcgtttgcaaggtctcttacatcacacaagttaaaggttccgttgattccgatggcagcttctccgttcatctgtttgagcagtccatcggttacctgtccgattgcattgtctccaggtccaaggatgccgcttggaagtacaaggcaggcgttcagatgctggttctttactgcatctaacacaagctgggaggccattgctttggattttccgtaagcactgatcaccggttccggatcgtaatagctgatttctttcattacggagcctttcggcgcttccggaatggaaccagtgcttcctacatatactaactttttgcattctttatgctccagacacagatcaataatattctgagttccgcctacattgatgtccatcacaatcttcggcatctccatgccgagtgcaacgatgcttgcacagtgcagaaccactgtttctgtatccgcatctacatggaagaaagtttctaaagatgctttatctctgagatcaccttctacaatctctacgtcctttggaatgtattgaattgcaggatcgttcggcagtacaaatgcacgtacgctttcgttctgctccaacagctgtctgcatacttcacttccgagatatcctgccgcaccggttactaaataagttcttttatttgccatgataattcctcctgatatttgtgaataattctaccggatcttgctgctgctcatgagatggatgcgaacagcaacaagaggtgtttctgttttttttgggggggggggtacaattgccagtatagcgagaatgaacagaaactcaatcatcaatgtggaaggaaatgtaaaataatcgacaagggagaagaatctgttggagaagtgggcacggatgatgaaattgatgttataatattaagaatgaatttactaaattactgaatagagggaagtatttgaaataatgaagaatatgaagttaaccgaaggacctattgtgaaaaatatgctactctttgcattaccgatgatgctgggtaatttcttgcagcaaatatataatatcgcagatatgtttattgtgggacggtttatcggttccgacgcattggcggcagttggatcggcatacacattgatgacatttttaacatcgctgattatagggctgtgtatggggagtggagcattattttgtgggaatagtctttatatttttgtataatttctatgcgtatcttttgcgctcagtaggaaattcgattgtaccattatattttttggcagtatcctcggttttaaacgttgttttggatttatattttgtgatttccctaaaaatgggaacgcccggagcagcgattgctaccgtaatttcacaaggaactgcgggaattggctgtctgtttcttctgtatggattttacagagggattgggcgtgcagaaatgtcttttatactgactgtcatttctcttggaacaagagttgtattagcttatgtctttgcaccgattatcggcgtaacagcaatttggtgggcaattcctatcggatggcttctggcggatacggtgggactgatatattacaaaaatgcctccctatcatatattgacagggaaacactttattcaaatagaaaatcataaagttatgaaccgtgtagccttttttgggtgctcctgtagttttgcttgaaacgagcaaagctacgggagcatttttattcgctatctttatatgtccggaattagaggacctccttattccgaacccaattatagtcaggtattccctaaaaagtaatacatgttcttaaaatcgagaaaagataatgaaaatgctaacaaaaacgtgaattcctattcatggaaaaaagtactttgagatattctatacttgaaaataggaaagctgtaaagggcagcataattgaaatgaaaaaggagagaacgaaatgatgaatacattaccacaagattttctggtaggtgcagcaactgcagcacatcaggtagaaggtaacaacatacacagcgattactgggcaatggagcacatgaaatacggaaattttaatgagccctctttagatgcggtggatcattacaaccgttatgaagaggatatcaagatggtcgcagaagccggtctgaatgcatatcgcttctctattgaatgggcaagaatcgagccaaagcagggtgtctatgatgagaacgagattgaacattaccgtaaagttcttacatgctgccgagaaaatggggtagagccgatcgtgacgatgatgcatttcacatctccaaaatggttgattgagaatggcggttgggagaatgaagcaaccgtagaggcgttcaagaactattgtcagtatgtaacagagcagttgggcgatctgatgcattatgtctgcaccatcaatgaggcgaatatgggaatccaggtagctgcaatctccgcacgttacagagcacagatgatggcaaagatgcagcgaatgcagcagggtggagcagaagagaaaaaggatctggaaggaactgctcaggttggaatgaatttcaacgacatgatggcaaatatgcagaaacagaaagaagagaacgtggaaatattcggaacagatactctccagacatttgtcagtgcaagaacaccggagggtgacatgcttgtgattcgtgcacatcaggcagcaagagcagctatgaaagcagtaaaaccggaacttcagattggtcttaccttatcactgcatgatattcaggcacaggaaggcggagaagagacagctgctaaagaatgggtggatgaatttacacactacgttccttatatcaaagaggatgatttctttggtttacagaactactcccgttcactcattggaccaaacggaattcttccggttccggagggagcagagatcacacagatggattatgaatattatccggaaggcttagagcatgtgatccgcagagtatatgaggaaatgccgatgccgatcatggtgacagagaacggtattgcaacagcagatgatacacgaagagttgcttacattcagacagcgatgaaaggtgtggagaactgtattcaggatggcattccggtcaaaggatatatgtactggtctatgatggataatttcgagtggcagaaaggattcggaatgacatttggtctgatctccgtagaccgcacaacacagacacgtacagcaaaaccaagtcttactgtacttggaaattatacaaaataatgaaaggtaaagattattagaatatgagaaatgtaatggaattaaaagacaactggatgtttgtgaaagaagcagagaatgcagcagatgcagcatcaaagaaaggaactgcagtaagtcttccgcatacatggaatgccgtagacggacaggacggcggcaatgactaccacagaggtacctgctggtatgtgacaaaatttcagaaaccggaattagaagcaggaagtcaggtatatgtggaattccttggtgcatctgtgatcgcagatgtctatctgaacggagaagcagtggcacatcacgagggtggatattctacattccgtgtgaatctgacagataagctgcaggaagaaaacgtgctggcagttgccttgaataatgcagacaataattatgtgtatccacagaaagcagactttacattctatggcggtctgtatcgtatggtgaacttgattgttgtaccggaaagccatttcgaactggattatgcgggaggaaatggaattgcagtgactccgaccgtagagtgtgacgaaaatcgcgtgccgacaggaaaagcatctgtgaaggtggagacatgggtgacaggaaatgcggattcagtcgtgattacaatcacaggagaagagagtgaatcaaagacagtttcggttgttgacggacacgcagaagcaacattcgaactggagcacgttcacctgtgggacggtgtggatgatccgtacttataccatgcaaaggcagaactttcaagcggagatgtgacagagactacatttggatgcagaagcttctacacagatccggaaaaaggattcgtattaaatggacgcgtatatcaactgcgtggtgtcagccgtcatcaggatcgtaccggagcaggaaatgcattgagctatgagatgcacaaagaagatatggagatcatcaaggaaatcggtgcgaacacaatccgacttgcgcattatcagcatgcacaggaattctatgatttgtgtgatgagtatggaatggttgtatgggcagagattccgtatattactatgcatatgccaaacggacgtgctaacacattaagtcagatggaagagcttgttgtacagaattacaatcatccgtccattgtatgctggggactttccaacgaaatcacagccgcaacaccggttgacgaggatttactagaaaaccacagattgctgaatgatctgtgccacaagttagacaagactcgttttacaacgatggcaaatgtattcatgcaggagacagacagcccgttgttggagattccggatgtgaacagctataacctgtatttcggatggtatctgggtgaactggaacagaatgatgaattttttgatgagtatcatgcgaaatatccggatcgttgtatcggattttctgagtatggtgcagacgctaatccacagtaccagagcacaaatccgactcacggagattattctgagacttaccagacagtatatcatgagcatatgttgaaaatgattgaggaacgtccatatctgtgggcaacacacgtatggaatatgtttgacttcgcggcagacggccgtgatgaaggcggcaagcatggagtgaaccagaaagggcttgtcacaatggacagaaagctgaaaaaggatgcattctatctgtataaagcatactggaacaaagaggacgctttcgttcacatctgtggaagcagatatgtagaccgcaaggaagacacaactgaagtaaaagtatattccaatcagacaacagtatctttgtatgtagacggaacattgttagaaactcaggacggaagtcgtattttccgatttgcagttccgatgacaggggagcatgagattgttgcgaaagcaggcgcagaagaggacagcatccacatccgtaaggtagaggaagcaaatccggattacgtgatgggagaaatcaaagatgttattaactggtttgatgatgaaccatataaaccggaatgctattctatcaaagataaaatgagtgagattaaggcaagtccgaaagcaggtgcaattctagcagaactgatggcacaggcacctggagcagaatcaagaggagatgtggcagaaagtgtcaaagacaatccgaatctggtccgcatgatgggaagaatgacgctggaaagtatgttaggacatatgaaagacagtatcacagaggaacaggtgaagggcttaaaccgcatgcttcagcagattaaaaaaggcgaataggcaggccgtcagttacaacaagaaaaacgtaaagaaaagaaggcacatccgggagtttggcttaaaccgggatgagcctttttctttgctaactacagctttgtatttttattccgataatcgctcggtgacatcccgaatgccttctggaaggaagaggagaaataacttcgggagccgaaggcgagttcatcgctgatttcctgaatattcatagtggttgcactaagcagcagctttgctttttctaattttacctgtttaataaagtctgcaatactgataccgatttctttcttgaatttgtgggaaaaataatattctgtgtagccggttctttcagcaagttctgcaattgagaacttctccccggggttcacggagatgtagtcgcaaatattctgaatctgggaagaaacatcagtagtctgttttgcagagcggacacgctgcataaaatcttccagcatagtatgggttaagttatttatggtagatgcacttttagcttcttcgagcttctgcatgtaatagtcgtttaatgtgtaggcaatggaaggatttaatccgccttcaatcgaagcacgtgagcagagtacgagcagaacaattacatcatttttctgtttacggagagaatcaccgatatcaaactttacaccactgcttagattggtggatttgccaagagccttcctataatcaggacttccttcccggaacatctgaagcatctcctgctcggctttccagataccggcatgttcatcagatatcagtttgaggtcattagaatctgaagtctgcccctgtggataagaaatgtcggcggtagtaattttttcacctgtaacagcatagtgaaacatcagggtgtactggtaaagacttgaggaaggcattaccggaatctgatcgatctgccgaaatattttcgagcgaagttttacagaaagcgtacgcgaatccaggtcttttttaattaacaaatgcgagttcttgccccttaaaataggtcccagcatatgaatgtgctttaattcagtctcctcgtattcgaaaacagaaatgtaaagaagacccatagaggaatccagccatatcggtgtgcgttttccggatgtgacatattcttgtaaagtgtcagcaaaatccagaatagaggaggcatcactgattacaagatcctgagggcagtttgtatgaataagttctaattcaggagtatacgtccataaatacacatcataattgcagcgcagcatttctttgaaaaattccagccgttcatttattgtcatctcatatcctccacttttcattattatttattcaaagatttcgaattctatatttcttctatccacgggagaagcaacgatatatcggattcatactcaaatcgaagtgttccggtttcaaaaagttccggttcattggcaatcgtacagaagatgtactggctcagtgcagatttcaaagcaaggcagtctccgtcgggcgtttcaaaaaacacctctccggtacatttcttcaattcttttaaaaaagccatcatatcaatctttccttttagtttcataagattaagtcctttcttctttctattataatcctttccttttattatggaagataaagctgagtgaaaagacaattttatcgtgaaaatgttatgagattcgtcatgtgatatatatatcatgaaaaaagaaacgaaaacacgaaaaatttgttacacaaccggggtggcacttttataatcaagataaagaatcaaaacaaaaaaggtattgggaggaacataagaatgaaagaaaagaagaaaaaattaacccaaagtgaaattgacggtgtgcagtatcgccgtgcgaaattgtggcagatcatctgttatgcatgtaacgccttcattggaatgagcgtgtattcgttgattggaatggcaagctacagtgcaagtattggattcggagttgcaacggccgttgtgggtgtgattttgacatgtacacgtattctggatggaattacagacccgctgcttgcatttgtgtacgaccgcgtaaacacaaagtttggtaaaattcggatcctaatggttgcaggatggggcattgaagcaataggactgctgggaatgttcagctggttgacagggaagtttacaggtattgcaggtatcgttgtattcacagtactttatgttgtatatgtaattggatatactatcgtaaatatgacaggacagacaattccggtactgatcagtaatgatccaaaacagcgtccgacaatcggcgtatgggtgacagcattgaactatctgctcccgatgacattgggaattgtatttaatgtagtacttcttcctaagtttggcggaacaatcaacctggaatacctctcagcagtatgtaagttagtaattatgatttcatttattggacttgttcttgtatgtctaggggtaagtgagtttgataaaccggagaactttgaaggattgaatgtaaaaaaagaaccattgaaagtgaaagatatggttgctgttctgaaggaaaacaaacctctgcagtgttacgttgcggcagctgcatcagataagattgcacaggtaacagcgtcacaggcagtcattacgacaatgatgggtggaattattatcggaaatatgggattatcttctatattaggaatggtttctatgctgccatcgattatatttgcaatttttggtgcaagatatgcaggaaagcacggaagtcaggaagcaattaccacatggacaaaggtatgtctggtattgggtgcaatcttaattgtattcttcgttgttatagatccgagtaaaatcggtgtgatgttcagttcaagtatgattatctatgtggtactgacattatttttaaacggagcaaaaatgtgtgtgtcgacggcaaatacttcatttatggcagacatcgttgactatgagttagacagaacaggaaaatatgttccggcagttgtatccggtacatacagcttcctggataaaattatcagttcatttggtgcgttgattgcatctgcatcagtagctctgattggatatacatcaacgatgccacagccgggagatgagtgtacaactggtgtattggtgttgacaattggtcttacatatgcacttccgatgttggggtggatctgcacattggttgctatgaaattctgtcatctcaatcgtgaggatatggtagcggttcagaaacgtatcgcagaaaagaaagaggctctgaaacagcagaaggctcaataatatggaaaatgtagaaattacagtttggcggaagctaaactggaatttttacaataaggcatatggggaaggagaaaacgatgcaaaatcaggaaatatttaagagaccggtatggaaagcaatattttccatggggatcccatccttgatctcggttctggttatgataatctacaacatggcggatatgtatttcattggctttttgaatgattacacacaggttgcggcagtatcccttattatgccggtgttcagtattatgacagcggtcagtatgctgcttggaaatggtggctgcaccctgattgcgcaggcactcggagcaggagagaagaaacgggcacgcagctatatgagcttgtgtatctggacagccattttattaggagtgattatagcaggtctgattatagttttttcgaatcctttgttgaaattcctcggaaccaatgaggaaatgtggcagtatgcaagaaattacatgcttattctggcagtggggtcaccggcaatgcttttgaattatacaattgcctgtcttgtccggggagagggtgtgattaaaccaggtttaattgccaattttgtctcaaccggtatgaatattctttgggatccggtgttgatccttggggtgaaaatgggtgtatcaggagccgcactggctaccgtgctgagtaatgtaattggcattgtctatctgatttggtataaaatgcatcatgaaatgattctgacattcaatccgaaaccggcgagagaaagtgtacgacatctggggcgagtatttgcacttggatttccaaatgccatttccaacattttaaatgggtttgcatcaacattcagcaaccaactccttgtactgtacggaacaagtgcagttgcggcgatggcggcagcaggcaaggcaacgatgatagtaggattactccagatggggctctgtatgggtgttcagccactgatggcgtattattacggtgccggggatatgagacgtatcaaagaggtcgtgatgaagttatttattcttacattagggattggcgttgttttcggagcggtgggaatgcttggaagcaaagctctggttggtctgtttatccgggatttggaagttgttgagctgggacagaagattgtctgcattcagttgttgtctgctccatttgcagggatatattatatcggacagaattttatgcaggcgacagggagtgctttgatggcgacgattacatcagttttgaggcaaggagtactactcataccgcttctttacattatgaatgcgatcatgaagatgatgggtattccaaccgcacatgtgatggccgattttatttcgattgtagtgacatcggtacttacggtaattatttataaaaaagtgaagaatcaactgaaacaaaagagggaggcttaattatgaaatatttttgtaatccggtaaatatcaattaccgctatcagtttaacatggatccaagagagggggcgttgaaggttgcccgcgaggcggcagacccgtccatgatttatttcaaaggaaagtattatattttcgcatcgatgaacttaagtgtctgggtgtcagaagatctggctcactgggagagtcatcgtctgccggagaaccttccgctgtatgattacgcaccggatgtgcgtgtgatgggcgagtatgtgtacttcagcgcatcaagacgcggagaggtttgtaatttctaccgcacgaaagacatcctaaacggagagtatgaagagattccgggaacctttgatttctgggatccgaacctgttcgtagatgatgacaaaagagtgtatttctactggggatgttccaatacaacaccgctctggggcgtggagatggatccgaaaaccatgctgccactcggcgaacgccaggtgatgattgagggagatgcatttgccaaagggtacgaacgtgcaggagaggatcactgtcagtggccactctcagatgaagagattgagatccgttttcaaggatttttgaaaatgaatcatcagacagaggagcagcttccgaaagaactagttccgttgattaaaggcatgctcagtcagaaaccatacattgagggtgcatggatggataagtgggacggaaaatattacttacagtatgcatgtccgggggcgcagtataatgtctatgcggacggtgtctatatcggtgacagcccgctcgggccatttacattggcgaagaacaatccattctcctataagccgggcggatttctcccaggtgcaggacatggttcaacgatggaggatacagcgggaaatctgtggcatacctcgaccatgcgaatcagtgtgaaccagcagttcgagcgtcgtgtcgggctctggcaggcaggaagggatgcagacggagagttattctgcaaccagcgttatggtgactggccgatggaagtgacaggcgagaagcaggatccatgggagaatccaaagtggtatcttttaagttatggaaaacaaatgacagcttcttcttgtgaagaaggaaaaggtccggaaaaagctgccgatgagaatgtacagacatggtggagagcagcatctgagaagccgggagaatggctacagattgatcttggcaaaaactatgatgtgcgtgccgtgcagatcaactttgcagatgataagattgacattccggttccagggaaaattaaaggaacacagacacagccaagatatatcgaagagcaggatcatgtgacgagatggattctggaaggctctgtggatggcgagcattatgaagtgttggagaataaatcacaggcggagacagatctgccgcatgatttggttgtgatggaagagggaaaacagattcgttatgtgaagttgacgattctggagatcccatatgatcaaaaaccatgtatctcaggattacgtgtattcggtatcggggaaggtgcgaaaccagaagtgccagaattcgaggcagtacgcgaaggtgatgtggatatgaacgtgtccatcaaggaaaatggagcaatgggctacaacatcctatggggacatgcgccggagaaactgtaccacagctatatggtattcggaaataccaaaaaggtaggagcgcttgttaaaggacaggactactgggtgagagtggatgctttcaatgagagtggaatcacagaaggtactgtgaagaaattataaaaaggagcgtcacacgatgccaaaattatttgcaacaggaaattcagaaatcagttcccgtgaaaagagaaacatggagcgtgccagaaaggtggcatcccagggaatggtattattggaaaacaagggagtacttccgattgacaaatccgtcaaaacaattgcattgttcggtaacggtgcaagaagaaccatcaaaggcggaactggttcgggagatgtcaacagccgctttgtggtgaacgtggaacagggactggaagatgcaggcttcagtctgacgacgaaagcatggatggatacatatgatacacaggtagagactgccagaatgggatattttggagaacttcagcaggagatggcagcaaaaggaatggctgctgtgatgaaaatctttacggagccatttgtagagccggcaatttccggagtgagtcagaaagaaattgatgcgatgaaagcagaccttgccatttacgtgctctcccgtaattccggagagggaaaagacagaactccgggggcaggagattatgagctgagtgatacagaaaaaactgcaattgcaaatcttgccaacgcctacgggaatctgattgtagtgctgaatgtaggcggcgttattgatacaaaattcttacgtgcacaggaaggcatcggtgcaatcttgctaatgagtcaggcgggcaatatcggcggacatgcgcttgcagacgtactgacaggcaaggtatctccgagcggtcatctgacaacaacatgggcagagaactatgaggattatccgaatgcgaagacgtttagccatatgaacggagatatccatgatgaatattatgaagagggaatctatgtcggatatcgctatttcgatacctttgatgtgactccggcttatccgtttggctatggaaaatcctatacaacatttgacgtaaagacagaagaagtgactgcagatgcgaaacagatttccgtaaaggtatgtgtgacaaataccggcgctacatacagcggaaaagaagtggtgcaggtatattattccgctccgacaggcaaactggaaaagccgtatcaggaactggcagcctatgcgaagacaaaggaacttgctccgggtgagagtgaagagcttattatcacttatcaggtggatcgcatggcatcttatgatgtacagagagcctcttatgtattggaagcaggaacctattatgtcagagttggtgtgaattccagagcaacgaaggtgtcagccgcagttgtgctggatcaggagactgtgacagaagtactgtcgaatcgccttgtattggactgcgagatgaatgagttatcatcagcagatgtgacaccttatggttatgcagaggaagaggctgaaaaagagcaggcttgtaagctcgatatcgcttccactgatatcgaaacaaaaactgtgacctatgaggaaacgaatgcagagattgctgcaaacacttcagagaaaaagattacgatgcaggatgtcatgtcagggcaggcgaccttagatgatctggttggtcagctgaccattccggagatggcagaattatgcgtcggtacatccagaggaaatatgggcggtgacactgctatcattggcagttcctctgcagttgtaccgggggcggcgggagacaccacttccctgatgattgaagatcgtgacattcgcaatctggtactggcggacggaccggcaggacttcgactgtcgaagcatttcaaggcagatgcagaaggcaatgtgattccgggaacaagtgatgcgccaattccgggaatggacttacttatggccggttcaccaaagccggagattccggaagatgccattgactattatcagtactgtactgcaatcccgattgccacactgcttgcccagacatgggatgtggatgcaatcaaagaatgcggagatattgtcggggaagagatgaaagaattcggtgtgacactgtggctggcaccggggatgaatattcacagaaatccgttgtgcggacgtaacttcgaatattattccgaggatccgcttgttgcagggaaatgtgcggcagcagatacattgggcgtacagcagcatgccggagttggcacaactatcaaacatttcgcactgaataatcaggaagataacagaatgcacacgaatgcacacgtcagtgagagagcggctcgtgagatttatctgaagggattcgagcttgcagtcaaagaagcaaaaccgatgtccattatgacatcctacaatctcatcaacggaatccattctgccaataataaagatttgttgacagccattacgagaaatgaatggggatttgacggaatcgttatgacagactgggggacaaccggcggtatggagatgaatcagggaatggaattcaagtacggatgctccagtgcagcaggatgtatcaaggcaggaaatgatctgacgatgcctggaaaacaggaggatgtggatgagattatcgcttcagtaggtgcgaaagatggcgatgtagtctgcccgatcacacttggagatcttcagacctgtgcgaagagaatgttgaatacgatcatgaagagttcggcatatatggaataagtgaggagacaagataacatggcagtaaaagcaattcagttaattcagatcggaacggcaatgggttccgaagaaaaggcaagagaaacgatccgcctgatgaaagaagccggatatgacggaatcgagctgaatggattcatgatgaaaaagatgccgccgatcgttcgtgttctgacaacccttgcggggatgccgattggaaagacagcgaaattagactggaagaagttgattgcggacaccggacttaaggtggtcagtatccacgaggatcttggaagcattcttagaaatccgcaggaaattatggaagaagcaaaaacattttccacaaagtatattgtcattacgggaatgcatcggtttgattattccaatatggcagcggtactggaattggcacagaagctaaataaggcaggaaaaattctgaaagaaggaggcatttccttgttatatcacaatcacaactgtgaattccgcaaagtgggagcgggaaaatgtgcctacgatgtgctgattgaaaagacaaatccggaatatgtcaacttcgaattcgattcttactgggcgacagaggccggtgtggatacgattgctctcatggaacgcttgggagagcggatgaagctctaccacatcaatgaccgaggaacaaggatgagcggaccgggaggacagattctcaaatcggacagtatggaacttggatacggtaatatgaacctgacgaagatggtggagattgcacagaaaagcggtgtggatgccgtgatactggaaagccataagaactgggtggacaagtccccggtgaagtcgttccagctcagtgcgaagtttatgaatgagcatgtgaaaaattagcttcaaaaaatgttgctctcaaattcagaaagaatcatttgaataacaggagaaaatgggaatatgaagaaacaaaaattcaatcatgactggatattcacagttggaagcggaagctccctggatgcattggctggtgggaacaatacggcaaaacaggtgactctgccgcgtgatgcatcaataggaagagagcgaaacccggaagaaccgaacggaagcggaaatggatttttccgagaggaaagctatgtgtacaccaagacattttcgatgaatgcagatgataaggataagaatgtatatctggagtttgaaggggtataccagaatgcttttgtatatgtaaacaattcatttgccgggaaatgcccgtacggatatagtaatttttatgttgatatcacaaaatatctgaactacaacgaaccgaatgcattaaaagtagttgtcaaaaatggagttccgagcggacgctggtatacaggaggcggaatttacagagatgtcaatctgatgattgctgatcgtcttcatcttgttccggacagtgtacagcttgcagcaattgaagtggaagatgatcaggcaatcattcgggcaaagtcaacaatcgcttacacaggaatcggaatccgggagattgcactgtgcacggaactgatggatgcagaaggaaatgtggttgctgcagatgaaatgccggtgatggtcgaggaacattctgaacaggaatatcagcagaaaatgtatgtaccaaatccaaatcgttgggatgcggagaatccatacctgtatacttatcgtacgtatatcaaagaaaatgattccgtgattgatgaggaaacaggaaccttcggaattcgtaaacttcagttggatacaaaacacggattgagagtgaatggaaaagttataaaactccgcggcggatgtattcatcatgataacggaattatcggaacagcagaatttacgcattctgcggaggagcgggtaaagaaactcaaagaaaccggcttcaatgcaatccgcagtgcccattatccgatgagccggaagctgttggaagcatgcgacaaatacggaatgtatgttatggatgagtattcggatgtatgggtaagtaccaaggtggaattcgattatagtacacagatgacagaatggtgggaacacgatatcgaaaatctggtgaaaaaagattataaccatccgtgtgtgattatgtactccatcggaaatgagattccggaggcgggaaataaattcgacgtgcagtggggcaaaaaactagcagataaattgcgttctctcgatgataccagatatacgacaaacagcctgaatctccttctggccatcatgaatgatcttccaaaattaatggcgcagaatgcagccgcacaggcagcagcgaatacagaaacagatcagcctcaggaaatcaacagcatgatgaacaatctgggggcaatgatggcacagttcatggcaagtgattttgcagctgagaaagtgaaagaggcatgtgcccaggtggatattaccggttacaactatgcggcagcacgctatgagattgatggaaaactgttcccaaaccgcatccttgtaggttccgagaccaatccgccggatttggacaaaaactgggaactggtcgagaaattgccatatgtaatcggggatttcgactggacagcatgggattatatcggagagacaggaattgggaaaattaattacacagatcagcagagcatgggattttacgcaccatatccttgcaaaattgcctattgcggagatatcaatattctcggaaatcgcagaccgatttcctattggagagaactgatctggggattaagaaaagcaccgtacattgccgtacagctcccgcagcattacggagaaccacagagtacgacacagtggagtatgtccgatgcagtccgcagctggaactggaacggatacgaagggaaacctgtaaaagtagaagtgtatgctgcagccgatgaagtagaactgttgattaacgggcagcgtgtggagcgtaagaaagtcggagaaacaaagaaatacatcacaattttcgacaccacatatcatgccggaaaagtagaagttattgcgtacagcgacggaaaagaatgtggcagagatgaaatactgacagcttcagacgaggttgtgattgccgcaaaagcagaccgtacacagattccggcagatggaagtgacatcgcctatatcgacatctgtatgcaggatgctttgggaattttgaatccaaatgcagacaaagcggtatctataagccttgacggtccgggagaaattatgggatatggaagtgcggatccggaatcggaggaaaactattacgatatggttgcgaaagcatacgaaggaaaacttcgtgctgcagtacgcggaaccggggaaacaggcaaaatcgtagtaacattatcggcggatggattagagtcagtaaaagtagatgttgaagccgtataagtacagtaatcattgaaatgatttcataatagaaggaggagctgacataagttggctcctccttttatctctcaaggagaaagggaagagtttacaattgctccaattctcccagcatatttgtaacaacatcctccggcagtccgagcatcggagcgagagctttgaaagtcataccgtaagcggcctttgcctgttcattttctgcaaagccaggcagatacttgtctacaattgctttggcgtcagtgttctccatgatagcagcaattgtgctgtctgcgtttaattttcctccggtcaggatttcaggatgcttccagcttgtcacattcttgcttccggcggagagtgcaccatcgacaggaattgcagctccggtgatgtaccgtgacatatcacttgcgaggaagagtgcaagataggcacattccatcggatcgcccatacgtccggcaggacagtcatttgcgaagaaatccattgcctgttccggtgcatctccgaagatacttgttttcgtgtatcctggacagattgcattgactgtgatcccgtatttagcataatccagtgcagcgacgcgtgtcattccgacaactccgaatttggttgcggtgtaaagagcctgaccacgttgcggcatgagtcctgcgatagaagcaacattgatgagaaatccgccttcacttttggatttgaagattgcttccgcaccatatttcattccggcaaagacgcctttgctgttcaagtcaaagattttctcataatcatccaaatcatattcatgaagaggacttccgcccatgccgatacctgcattgctcacaactccgtcgagacgtccataatgaacaactgccttatctacgagatctttaatcgcatttccgtcactacaatctgtctgaacaaaaattgcgtcccctccattgttgataatatcgttcactacagcttgtccctgttccacacttcgtgcggcacagattactttcatgccatttgctgcatagcagcgggcaattgcctctccaattccacggcttgcaccggtgacgattgctacttttccttctacacttttgaaatccataaataatatcctcctgatgagttcataattgaatttagaaaatacatttctatgagacaagtttaaaaggaagaatgaaaatgaaggaataaaaaatcgtgattttgagtgcaaattcgtgtaaaagaggttgtgacatgtattcggaaacaaaatcaagagaaatagaacttgagatggggagagtgatgtgggaaggggctgaccccaatgtgatgccatttcaatttatagaaaaatatgttctaaggttatcagaaaagtgagattagtgaattggtgtgattgctgagagaaagagcaaggctccgtgcaggaaattcaccggttcctcttttaatgctgtagagcttgcagcatctccatcgttagaacttgcatatatcgtagctgccccgagaatggcatattatatgacctacagtacgagaatttacgatatttatttaaaatacattgcaccggaagatatgcatgtgtattctatagatgaagttttcatggatgtaacggcgtatctttcaacctacaagatgacagcccatgagttggcacttaaaatgattcgggatgtccttggggaaaccggtgttacggcaacggccggtattggcagcaacatgtacctttgcaagattgccctggatattgtggcaaagaagatgccagcagataaggatggggtgcgtatcgcagagcttacggagcgaagctacaggaaattattatggaatcatacgccactgaccgatttctggagaataggcaatggatacgccaagaaacttatggaaaacggcatgtttacaatggggatggggcctactacaatagctgagattcgggcatataaaccacagaataacagtgtaagctccaggcaggtattgcattgccctatacagcagagaaagcaaagcttattgtgaaggagatgacggatttactggttcttgacctcgtggataagaaacttcttacagaccagatggtgcttcatattggatacgatatcgaaagtctgacagatccggaggttcgaagaaagtatcagggcgagctgatgggagtaagtggatataatcttgcggtctctctcgtatggtttttggcattgatgctgggaacaggagtacttccgcatgtaatggacattacaatcaattatggatctgatacatattggtgcagaggaggtatttttgttaatctctgtattgtgtttttaatcattcttactattacgggatttgggtatactatcagttacaaaatagtggagataaagtgtattcatttggacggtggattggatggagcaatggaagtaaatgatgccgctatgaatgcaaatctgaaaggacaaatagcaaaagcggcagggggagcgtatgttgatacgaaggcgcttacaggcccgatggctattttgtcaaggtattgtgtgcaaaatggtgtaagtataatgaattcgcgtgtgtttaagtggataaacagagcatgcattgcagcgcagattatatttgctgttgcttgtttctgtatctttattcaatattagtagtcgggagaagttaatgggaaagataataattcacaaatcgcttttaggccatataaagattgacggaagttttattgatgataaagttaaagagttagaaatggctagtggaatatatgatatagttggcggaacagattgcgattcatcatataatacagaaagctatcagcatggaagtaaatccagtataacctggggaatacatgaaaaagtgaaaattgacgataaatccgtttgccatgtgcatgtaaaaagaaaattgtcatttttatatattgttccggtaatcaaagtgaaatatgagagtaatgaggtattataaaatgtcagatatcaaaggtaagatagttttaaaaacacctttcatttgtgaatgttgtatcagaagtgatagggtatacaaaactctaaattctttcaaaaaaacacaatggttgaactatcagcaggcaagcatatgattaatgtgggtatcggttatgatgaaatgccagagagcagcagagtatatagtgcggatacttgggcatgggaaagcgataaagcaatagaaatcggtgaaaatgctttgcttatttcgataaagagaaaatggcatttatttaggccggttacagtagaagctgaaataataaaatagtggaaacatactgcaaggagataatgatgagtaagttgagttttgataagaaaacctttaactggggctatggttttgtctataccttccaaagtcgaagttagaagaccacagtcacaattattatgaattctatttctttttggaaggaaatgtatcgattgaaattgcaggagaaaggcgtccgcttcagtacggagatgtcgttctaattccgccggaagtggcacaccatgttgtgattcatgatgtggaaatgccgtatcgcagatttgtcttttggattagcaaagagtatgcaaatcagttgatgcagttgtcacaagcttacggatatctgatgcaacaggcagcggtgactggtaaatacattttccataatgatagaatttcgtttaacgcaatacagacaaaggtgtttcgtttgatagaagaaatccactccaatcgttttggaaaagaagcgaagatatctttgtgcctgaatgatctgatacttcatttgaatcgaacagcatatgagcaggagcatccgaagagtcagaaagaggagcagaacttatatgagaatctgatggattatatcgaagaacatctagatgaggaattgacattagagaagctggcaggtgaattctttgtcagcaaatactatattgcgcatatctttaaagaaaatattggactatccattcatcaatatatcatgaaaaaaaggctgtctgttagtagggatgccattctcaccggatacaaaatcacagaagtatacttgatgtatggatttaaagattactctagcttctttcgggcgtttaaaaaggagtacggaatatcgccgaaggaatttcgagagatgaattcggtggatgtaaacgaatttacgaacaaaatatagaaatcatgaatgtaataatttttgccattcgctataatttctattatgagataccctatgtataatggaaatgaaggagaatattcgaatatgaaagcgataaaacttagaacagagcagaaggtaaatccaatcggaatagacgggaaagaacagttcctctcatggatttgtgaggacggaatctctcagagtgcatatcagattaaagcatgtactggagatcagaccatttatgatagcggtaaagtggcaagtcaggacatgcatcatctgttggaactgaatctggaaagcagacagcgtgtctgctggaaggtgcgtctgtgggatgaaaaagacgaagccggagaatggagtgaagaggcttattttgaaatgggtctcttaagcgatgaagattggaatgcccagtggatcaatccagaactttccaaacttacaacaaaggaatacgactgcagtgatgcaatcaatgcacaggcaaagagggaatgggaaacacgggaaatcgaaggcgagtatgaagtacatcagcctgcaagctacctgcgacgtgtattcagtgcacctgagggaacaatgaaaagattctatattacctgtcacgggttatatgaggcatggctaaatggaaaacgtgtaggtgatgccgttctgatgccgggcagtagcaattacaataatgagcttatttatcagacatatgatgttgcagatttattgcgtgaaggtgagaatgagctggtgattgttcttggtgatggctggtatcgttctacatccggagtcgatggtgaccgcggtgtgttcggacaggaactgggattattatgtcagttggaagtggatggagaatcggtgcttgtatctgatgagacatgggaagcaagtcaggcaggacctctgcagcagaatgatatgcagcagggagaagtatacgatgcgagaaaagaaacatttgccacagaaaacggcgtgtggcatccggtaaaaacagaagactttgataagaacctgctgaaaggaatgaatactgtcccaatcaaggaaatggagaacttcgaaggtaaactgattcagactccgaatggagagacgatcatcgatttcggacagaatcttgccggatatgtggaatttactgtatttggtaaagacggtgaaacgattgttctgactcatggagagtctttggatgagaacgggaacttcacgacggagaatttccaggatcgtaaacgccacaaagagggcggtacgtatcagatgatttcatacatttgcaaggatggagagaatcactacaagccgagatttaccatcatgggattccgctacgcaaaagtggagacaatacttgatctgtcagatgcaacatttatcgcgcatgcagtgtattccgagatggaagagacagcagacttcacttgtggaaatgcggatgtgaaccagttggtatggaacagtaaatggagtcagaagggcaacttctgtgatgtgccgaccgactgcccgactcgtgagagagcagcgtggacaggagatgcgggactttatgtcgatacggggctgatgctgatggatagttataatgtatatagaaaatggctggcgcagtgtcgttacggacagtatccggaaggcaaggtggcaaatatcgcaccgccgaacagcaaaggaagctttatgacagcgatgctggcaggttctgtcggctggggggatgcctgcattattgtgccaatggcaatgtatcgtaagtatggagatgttcgtatactggaagaaaattatgaaatgatgaagaactggtatgcctttttggaaagccgtgcagagaacaatgcaattcagtcgggtattgattacggtgagtggtgcgagccgggaaccaatccaatgatgtctatgcagaacggaaactttgatgttgcaaccgcatatttcgcacattccggggaaacgttgtctgagattgcagcgattctcggcaaagaagaggatgcggcacattaccgtgaagtatcagaaaacgccaagaaagcatttgaggaaatctttacgaaagacggcgtggtagaatcagagcgtcagtgtcagtacatccgtccgattcagtttggccttgtgaatgaagaaaactgtgcgaagaatgcagagaagctgaacgaactggtgcttgcaaatgactatcatctgaacaccggattcctgacaacaccggcaatctgcggtatactgtgcgaatacggatatgaagataccgcattcaaacttctgcttcaggagtctgcaccgggatggctgtatgccgtgaagaaaggtgccacgacaatctgggagacatgggatggtatcaatgaagaaggaaaaccaagcgaatctctgaatcattattcctatggtgcaattaccggatggctgatcggtggcgtatgcggaattcagcaggaaggaagaaaaatcacaataaaaccaatcgcatgcaaggaattatcgcatgcaaaggcagtgtatgattctccggttggaacaattgagagcggatggaaatacgaaggtaataagattacgttcgagtttgttattccggtgaacacggtggcagaagtagtgctaccgaatggggagagacatgaacttgcgccgggagtacatcagttctaatggatgtggatagttaaaaaagaaatggatacacatgtaaggggggcttaccgatttatttcgataagccccctttttgttgctgaatctcgttgattttttcatctgaaagctcggtgttatctaaaagcattgtccggaacatttgaagtaacatttgaaaagcctgtatccatgtgatatcagacatttcatctgaaaagtatagaaaaagctcgcgcagggatcgattatcattggattccctgctttccagcgacaacatcatgtatcgtgtaaaaacgactgcagtatgtgcagtcattgcatcataggaaagggagttacattctttgctgaggttaaggtagcttttgcacaccttgaagaacacatctatgtcccaacgttttccatagatccggatgatttcattctcatccagatttacgtccgtggaaataaggcagagatattccttgcgtttattacgattgcgaacataaactactttggcaggaatgatttcaccatcctttacaacatcaaccataacggaaagcagatatcttgatcttccgcgcctctttttgttcgtgttgtagatagaagttagagacatatcttcgccattgtagcggaaaaacatctttggtgttttcttgaccatgccgattacatcgtaacccatactttttactgcgtgaagagtgcttggtgatgaaaaccagctgtcaaaaagaacatatttcgccgaaattgtagctttcctggctgcatccaaaagcgtaagcatagcttgtgttcctttttccatggaaagcttccggcgtttgtagccaacagttcttttatccacttctgttgcttcattgatgcggtttttcctgttttctgtggaaagaagaacgctgttgaccggcaggaaagtacttccatctgaccagcctaaagtaagcattcgaaaaccaaagcgatatttatgttttgcatggtcatagactttggcaaggagttcaaccttttttgagcggttacgctcaaacatggaatcatcaatgataagaacatttgcacgatcctcagaattcaaaggcagaatggcatccctgatgattcgggttgaaagtattgttgtgaagcggatccagttgatctgaatcattttcataaaacgatatacagtatccttcgcaaaatcaggagtgttccgtcctgtgatcaggttcatgtacatgcttctgttagaaaaaatcagcagaaacagatactggaaaatttccattactggaacgcctttctttttgtaggcattggatgctttcaaagctgaagaaacatgaaatctcgtaaaaaatcttttgatagattttgaaatctgcttatcatttctggaaaggaatgtgcggacgtcgtgcatggaatcgcttcccggtggatatagttattaggagaaaacatgacgcggaggattgccatggagcgggaagagcggatcagacatcagaaagaattccttattaagtttgcatactgggcggtgtggggtggacttgtcctcgcggcggtaaaaatgatcggaccggtgctcctaccgtttattgcggcattttttgtggcgtggattctttcgtttccggtggcgtttgcgacagagcgcatgcatataaggcgcaggattgcagcggtggcggtcgttctgctgttttacggactggcgggactggtgatcggattccttggaaaccgcatcatgcttttgggacaggaactgctcggggaagtggtgcggtttgtctcggagacgatttttccgatgatgaagcatttctgcgcgtggacggcaggtttgactggagagacggtgggaggagaggtgctgcggacggcgggtacggagtcggcggaggcggtcagccgggcaggggagcttctgaccggaatgtccggcaccctgctgcagcaggtctccggcattgcggtaaatattccggggatgtgctttaaattgctgcttgcggtcatatcgacggtgttcatggaactggattttccacaaatcatgcgcttccttgaaaagatcataccggaaaaatggaaggagacggtgctcgccgttaaaaagggaaccttcggaacgatgggaaaatgtgcggcggcatacgttttcatctttttgatgacgtttgcggaacttgcggcaggtctgcttcttctgcggatcgagggcgcttttgcgatagcgtttctgatcgcggtgttagatattctgccagtgctcggcacgggaaccgtgctgcttccgtgggcggtgattgcgtttgccggcggcaatgccagaatgggaatcggggtgatagggctgtatctgatcatcacagtggtgcgcaacattgtggagccgaagctggtgggaaaacagatggggctttctccggttgtgatgctgccgtgtatgattgtcgggcttcatttctttggaatcttaggactgttcggcgtgccgcttctggcatcgtttttgaaaaaactctacagtgacggctatttttctgaaaaactttccggagattgtcaaaagaaaaattgaacttgtcacacaaaacatgtataataaagcaagaatatgtttgacaggggaaatgacaatggcagaaaagattattttgacaggtgaccgtcctaccggcaaactgcatgtgggacattatgtgggttctctgaagcggagagtggaacttcagaattcggggacgtttgataagatatttattatgattgcggacgcacaggcgctgacggacaacgccgacaatcctgcaaaggtgcgtgacaatattatggaggtggcactcgactacctttcggttggaatcgatccggcgaagtctcatatttttatccagtcctacgtgacggagctgacggagttgacattctattaccagaatctggttacggtctccagattgcagcgcaacccgacggttaaggcggagattcagatgcgtaatttcgaggcgagcattccggtcggattcttcaattatccgatcagccaggcggcggacatcacggcatttcatgcgacgacggttccggtcggcgaggatcagatgccgatgcttgagcagaccaaggagattgtacataagtttaatgcggtgtatggcgagacgctcacagatccgcagattttacttccggataacaaggcctgcttaagacttccaggtaccgacggaaaggccaaaatgagcaagtcgctcggcaactgcatctatctctcggagagcgaggcggatgtgaagaagaagatcatgtccatgttcacggacccggatcatatccggatcgaagatcctggaaaactcgaaggaaataccgtatttacctatctggatgcattctgtacggacgggcattttgcggaatatctgccggagtatgcgaacctggatgagctgaaggcacattacaaacgtggcggtctgggggatgtcaaggtgaagaagttcctgaataatgtcatgcaggaggagctgtctccgatccgtgcgcgcaggaaggaatatgagcagcgcatcggcgatgtgtatgatattttaaaggcgggaagcgaagtggcaaaggaagaggctgcaaagacactttccgaggtaaagcatgccatgaagattgattattttgatacaccggagttcctggaggaacaggtgaagaagtattccgagtaatcacaaattgttttttacaaattcaggcaattcatgttatattatacttgcaccttgacggtgtatcatgtatgatatttcatgagttgctttctctttttttgacagggaaagcagaccggacggcaggctgtccggattgtaattgaggaggatgcgacattatggaaaatgaaaatgtctcaaagaattttattgagcagatgattgacaaggacatcgaggaagggcactgcaaggttgttcataccagatttccaccggaaccgaatggctatctgcatatcggccatgcgaagtccattcttttgaattatggtctggcacagaagtatggcggaaagtttaatctgagatttgacgatacaaatcctaccaaggagaagaccgagttcgtggaggcgatcacggaggacatcaagtggcttggtgcggactgggagggcagacttttcttcgcatccgactatttcgatcagatgtatgagtgtgccgtagagctgattaaaaaaggaaaagcttatgtctccgatctgtctgcagagcagatccgtgagtaccgtggaacgctgacggagccgggcagggaagatccgtacagcagcagaagcatcgaggagaatttaaagttgtttgaggagatgcgggaaggaaagtatgcggacggtgagaaagtgctccgtgcacgcattgatatgagctcttccaacatcaatatgagggatcctgtcatttaccgtgtggcacacatgacacaccacagaaccggcgataaatggtgcatctacccgatgtacgattttgcacatccgcttgaggatgcgatcgagggaatcacgcattccatctgtacgctggagtttgaggatcacagaccgctctatgagtgggtcatcaacgaggtgggggcacagattatcccggataagaatgagatgccgccgagacagattgagtttgcaaagctgtatctgaccaacgtggtaaccggcaagcgttacatcaagcgcctggtggaggaaggtattgtggacggatgggatgatccacgtctggtatccatcgcagcgctgcgcagaagaggattcacaccggaatcattaaagatgttcgtagaactgtgcggtatttcaaaggcaaacagttctgttgactatgcaatgttagagtactgcatccgcgaggatctcaagatgaagaagtcccgtatgatggcagttcttgatccggtgaaggttgtgattgacaactatccggaaggacagaccgaatatctggacgttgtgaacaatctggagaatgaggcgcttggctcacgtaagattccgttctcaagagaactctatatcgagcgtgaagacttcatggaggagccgccgaagaagtatttccgtatgttcccgggcaatgaagtgcgcctgatgaatgcatattttgtaacctgcaacagctttgagaaggatgcagacggtaacgtgacggtaatccattgtacttacgatccggcgtcccgcggcggcaacagcccggacggcagaaaggtaaaaggtacgattcactgggtatccgcaacacatgcggttcctgcaacggtcagactgtatgagaatatcgtggacgaggaaaaaggggtatacaatgaggatggaagtctgaacctcaatccgaattcactgactgtgttaaagaactgtatggtggaggagaatcttgctggggcaaaggcttacgacagtttccagtttgtacgccagggattcttctgtgtggatgcaaaggattcgacgccggagcagctggtgttcaaccgcattgtgtcactgaagagttcattcaagctgccaactgcgtaggacgcggcctgagatttaggaggaatagatatgaatttattatccggtttggaaaaatttggtttaaaggcagaggataccacgaatctttttgcggaagaaaagaaagaagtcgtgggagaggacggcataaagcaggaggcggtgccaacagaagacagctttcttctggacaaggctgtgcgctgtgcagtgtgcgacaaggtatttaagacaaagatgatcaagagcggaagattaaagcgtcttgagtccgacatggatctgcgtccccgctatgagcacatcgacactttaaagtacagtgtgatttcctgcccgtactgcggctataccgcgattacgcgctattttgaacacctgtcctccatgcaggtcaagatgatcagggagaagatctgtgtgaatttcaagccggcggacaatgtggagccgacgctgatcgattatgatactgcgatcgagcgctacaagctggcactgttcaacacgattgtgaaaaaaggtaagaacagtgagaaggcgtacacctgcctgaatcttgcatggctgctgcgcggcaagcgcgagtctttagatgcgaaggatccgaagatggcagagcagatcaaggagtgcagggaacaggaagaggcgttctatgcacaggcgtatgaaggctttaccaaggcggtatccacagagacctatccgatgtgcggcatggatgagtgcacgatggattatctgctcgcaacgatggcataccactacaaaaagtacgatgttgcatcgaagtgcattgcaagaatcctgcagtctgcggcggcatccaagaagatgaaggaccgcgcgtacgaactcaaggagcgcattgtcgaggagatcaagagaagcaaggcataacggcggataaggctttacgatgatagagattatgatgaacttacaggggggagcgaaagctcccctctatgagaaaatatacgaatatatcaagagcgagattacagatggcaggattccgagaggggaacggttgccgtccacgcgtcttctggcgaagaatcttgcggtgagcagaagcaccgtagagatggcatatgatcagctcctggcagagggatatatacaagcggaaccctgccggggtttttttgtatgcgatatcgcggagctgtaccggcttcggggaagcagcgtcggagaaacgggacaggtacacagaccggaaaaaccggtctgcctggttgatttttccccgtatgcgatcgatacccgcagttttccgtacaacgtctggcggaagatcagccggaatgtgctgttggacgacagtgaggaactgttaatggcgggggacggacagggggagtacagtctgcgcagtgagattgcggattatctgcatcacgccagaggtgtgaactgccgcccggaaaacatcgtgctcggagccggaaatgagtatctggagattctgctcacgcagcttctcggaggaaataagaccgtgctcatggagaacccgggatatccgcaggcataccacaccttccggaatatgggataccgggtggtgacggtgccggcggacgagcagggacttagcggcggtacggtgcgtgcggcggcaccggagcttgtctacatgatgccgtcccatcagttcccgaccggcagcgtcatgcctctgggcagaagactggaacttcttgcgtgggcggcggagcaggaggagcgctatctgatcgaggacgatcacgacagcgagtaccgttaccgtggaaagccgattccgtcgctgcagagcgtggatggactcgggaaggtaatttatcttggaacattttccaaaagtatcgcgccgtcgctgcgtatcagttatatggtgcttccgcagcagctgatagagcgctaccgcaccgtctgcggattttattcgacgacggtgccgcgcatgcagcaggagattctccgggagttcttgcgggatgggcattttgagcggcatctcaacaagatgcgcggcatttaccgcggcaggcatgattttttgatcggtgaactgaaaaaaagaagctgggtgctctcagtcagtggagaccatgcgggactccatgtgctcgtggaggcggataccggatgcagtgagcgggagatctgtgaacgtgcggcggcgcagggcgtgaaagtatcgggtcttggcgaatatgcactgacgaaagatggcggcggtggcagaaaccatccggtgctgctgcttggatacggcagcctgaccgagcaggagattcagatgggtcttaccgtgctggattcgatactggatgcgcaggaaagcggatgatcagaaagaaaatgattggaatgtgaataaccggacagaaaaggaacccccggaaatctgccgaaacggcagatttccgggggttcttgtgtaagcaatccggatgtacgatttattcgtatttgtttttctcgccgatttcctgcatcttcattgcacgaacttttaacggcagtccgaacagtgtgatgaatccggaagcatcgtggtgatcgtagagatcgccggtggtgaagcttgccaaggactcgctgtagagagaatacggggatgtcgttccggctttgatgatgttgcccttgtaaagcttgaacttgacttcaccggtcacatattcctgtgtggaggtaacaaatgctctcactgcgtcgcagagaggggtgtaccatttgccctcgtatacgatctgagcgagcttgttgcccatatctttcttcacttccatggtagcacggtcaagtaccagctcctcgagctgctgatgtgcttccatcagaatggttccgccaggagtctcatagacaccgcgggatttcatgccgacaacacggttctctacgatgtcgatgatgccgacgccgtgcttgccgccgagacggttcaactcacggataatatcggaaaccttcatcttcttgccgttgacggaggtcggaacacctttctcgaaggtcatggtcacatactcgccctcctcaggagctttttccggggagacgccgagtaccagcaggtgatcgtagttcggctcacaggcaggatcctcgagttcaagaccctcgtggctgatatgccagatgttgcggtcgcggctgtagctggtgtctgcggagaacggaagatgaatgccgtgtgcctggcagtatgcgatctcatcctcgcgggactgcatggtccatttgtcgtctctccatgcagcgataatcttgagatccggagcgagtgccttgatggcaagctcaaaacggatctggtcgtttccttttccggtagcgccgtggcagatggcggtagcgccttcttttcttgcgatctcaaccagcttcttgccgattaacggacgtgccatggaagtgccgagcagatatttgttctcgtagatggcgtttgcctgtacgcacggcatgatgtagtcatcgcagaactcgtcgatgatgtcgacgatgtaaagcttggaagctccgcaggagatggctctttcttccagaccatccagttcttcctcctgaccgcagtcgatgcagcagcagatgacttcgtaatcgtaattctcctttaaccagggaatgatggcggtggtgtccagaccgccggagtaagctaagataactttttctttcatgggcttttttcctttctgtaaatcattaactgcaatcaatatacaacatatgcaacggaaaagcaagtgaaaaaatatacatatatttcaaataaaaatgcatatacatgtacaaagcatacagaatgaaaatagggaaaacctatataaattaaggaaaaaagaaatccaaagcaagaaaaacgttgcataaatagtaaaacagtgcttgcataaaagaaaaaacggatgtataattatgcaagaatatttctaaaaagcggacaaaaaatactttactatggcaaagaggtagactaatatagggatatagtgtgaaaagattttttgcaggaaaaggaaaggcggaatacgaacatgataaaggcaggaatcataggtgcgaccggttatgcgggaaatgagctggtgcgtcttctgatgggacataaagaagtggaaatcaaatggtacggttccagaagttatatagatcagaaatacgcagaagtatatcagaacatgtttgagatcgtggatgacgtgtgtatggacgacaatatggaagcactggcagagcaggtggatgtgatctttacggcgacgccgcagggatttctggcaggcgtcttaaacgaaggacttcttgagaagacaaagatcatcgatctgtccgcggatttccgtatcaaggatgttgcggtgtatgagaaatggtacaagattgagcacaagagcccgcagtttatcggggaggcggtgtacggcctttgcgaagtgaaccgcgataaagtgaaaaatgccagactggttgccaatccgggctgctacacaacctgttcgattctgacggcatatccgctggtgaaggaagggctgatcgatccggatacccttatcattgatgcgaagtccggtacctccggcgcagggcgcggtgcgaagctgccgaatctgttctgtgaggtcaatgagaatatgaaggcgtacggtgtcacgagccacagacatacaccggagattgaagagcagctcggctacgcggcaggcagaccggttgttgtgaattttacgccgcatctggtgccgatgaaccgcggaattctggcgacagaatatgccaccctgacgaaaaaggcggacggaagtcttccttcttacgaggagatcaaggcggcttacgataagtattatgcgaaggaaaagttcgtccgcgtgcttccgaaggatgcgtgcccggagaccaaatgggtcgagggaagcaattatgtggatatcggttttaagatcgatgagcgcacgggcagaatcgtgatgatgggagcacttgacaatctggtcaagggtgcggccggacaggcagtgcagaacatgaatctgctgtttggatttgacgaggcggaagggctttgtctggtgccgatgttcccgtagatacagagcgaaaacagaatccgggaaggattttccgcggaaggaagcagcggaaaaatgaaccggaaatgataaagagaagagatggaagtatgaaagagacagaaccggtcatccgcgtgatgacaatggatgattttgaagcggtacatgcgttatggatggagattcacgggtttggaatccgcagcatcgatgattccagagagggcgtggagcgttttataagacgtaatccgaccaccagcatggtagcggtggcggagggaaagattgtgggcgcgattctctgcggacatgacggaagaagaggctgcctgtatcatgtatgcgtgcaggaggcgtaccgcaagcacgggatcggacagaaacttgtgggtgcctgcgtggatgcgcttgcggcagagcatatcaataagatcaacttgattgcattcaagaaaaatgaagtcggaaaccgtttctggcagggactcgggtggactttccgcgaggatgtcaactattacgaatatgtcacaaacgaggacaatatcacgacctataatccataggaagaaaaggagtgcggaatgataaagatgataaagggcggagtgaccgccgcaaaaggattttgtgctgccagcacggcggctggtatcaaatatcagaacagacaggacatggcaatgctctacagcgaggttccctgtgcggtggcgggaacttttaccacgaatctggtgaaggctgccccggtaaagtgggatcagaagattgtatacgagagcaaaaaggcgcaggcggttgtgatcaatgcggggattgccaatgcgtgtaccggcgaggagggaatgcgctactgcagacagacggcggaaaaagtcggtgaactgcttccggttcccaaggatcaggtgctcgtggcatcgaccggagtgatcggcatgcagcttccgatggagcgcatctgtgcgggaattgagacgatggttccggcattgtcgggtgagacagagagcggtcatgcggcggcacaggcgatcatgacgacggatacccacgagaaggagattgcggtggaagtcatgcttggcggcgttcctgttacgatcggcggcatgtgcaaaggctcgggcatgattcatccgaacatgtgcacgatgttgagttttgtgacaacggatgcggcgatcgcacagcccctgcttttagaagcgctgcaggcagatgtctgcgacacctataatatgatctccgtggacggcgacacttccaccaatgatacctgtctgcttttagcgaacgggatggcggagaatccggtcatttcagagaaaaatgaggattacgacaggttctgcgaggcattgcggacagtcaatgaatatctggcgaagcagatggcaggcgacggcgagggagccacggcgctgtttgaggtgaaggtcatcggagcagagacgaaagagcaggcgaagatcatcagcaagtcggtcatcacatcgaatctgaccaaggcggcaatctacggacacgatgcaaactggggaagaattctctgcgcgatgggttactcgggcgcacagtttgatccggagaaggtggatctgttctttgagagtgcggcaggaaaaatgcagatcataaaggacggcgtggcacttgactacagcgaggaggaggcgacgaagatcctctcggagccggaggtgacggcgatcgcggatatcaagatgggcacggcggaggcgacggcgtggggctgtgatctgacatatgattatgtcaagatcaacgcggattaccgttcctaagcagagacgtaaaaattcagggagagtggagagaaaatggacgagaaaaatatgcaggaaattctggcaaaggcggaagtgctgatcgaggcgctcccttatatacagcgttttaaccgcaagatcattgtggtaaagtacggcggaagcgccatggtggacgaggagttaaagcgccatgtgatccaggatgtgaccctcttaaaactggttggattcaagccgatcatcgtgcacggcggaggcaaggagatcagccgctgggttggaaaagtcggcatggagccggtgtttgtcaacggactccgcaagacggatgaggcgacgatggagattgcggagatggtcttaaataaggtcaacaaatctctggtcaagctggtggaagagctgggtgtcaatgcaatcggtatcagcggcaaggacggcggactgctcaaggtggagaaaaaatattccaacggggaggacatcggatttgtcggcgagatcacggaggtcaatccgaagatcctctacgatcttctggagaaggattttctgccgatcgtgtgtccggtcggaatggatgatgcctacaacagctacaatatcaacgcggatgatgcggcttgtgcgattgcaaaggcggtcagcgcggagaagcttgcatttttgacggacattgagggtgtatacaaggatccttcggacaagagcacgctcatctcggaactgaccatcgacgaggcgagagcattgatcggcgacggctttatcgggggcggtatgctgccgaaactgaacaactgcatcgacgccattgaaaacggcgtgtccagagtacatattttagacgggcggatcgcacattgtctgctccttgagatctttaccaacagaggtatcggtacggcgatccttagtgagaaagagaagaggtattacaatgaataaagagacatgcatgaaagaggcggaggagagcatcctccatacctataaccgtttcccggtggtgtttgaccatggggagggcgtatacctgtatgacacggacggaaaagaatatctggattttgcagcgggaatcgccgtgcaggcatttgggtatcataacagggagtacagcgaggcgctaaagacgcaggtggataagctgatgcacacgtccaacctgttttacaacgagccgatcacaagcgcggcgaaacgtgtcttaaaggcaagccggatggatcgcgtcttttttacgaacagtggcacggaggcaatcgagggagccttaaaagccgcaaagaaatacgcgtacaccagggacggtcatgcagggcatgagatcattgccatgaatcactcgttccatggcagaagtctcggagcactctcggtaaccggcaataaacattaccaggaaccgtttgaaccgctgatcccgggaatccgtttcgcggaatttaatcagttagacagcgtaaaagctttgataaatgagaaaacctgtgctattattttggagacggtacagggcgagggtggaatctacccggcaaccgacgaattccttcagggggtgcgtgcactctgcgatgagcatgacattctgctgatcttagatgagatccagtgcggcatggggcgcaccggcgagatgttcgcatggcagcactacggtgtgaaaccggacattatgaccagcgcgaaggcgcttggatgcggtgttccggtgggagcattcctgatgactgagcgcgtggcggaaaagtcgctggcatcgggcgatcacgggacgacctacggcggcaacccgtttgtcggagcagcagttgacaccgtgcttaagatgatggagcgggatcggattacagagcatgtaaaagagatcacgccgtatctggagcagaagctggatgcgcttgtggaaaagtatgatttccttacggcgcgcagaggtctgggactgatgcagggcgttgtgtgtgagaaaccggttggaaaaattgcgtcagcagcattggaacacggacttgtcgtgatcacggcaggcgccgatgtgcttcgttttgtacctccactgattatcgggaaagagcatgtggatgagatggcagagaagctggatgcggttctggcagagatgtaattccctgataatgagaataaaaaaacggattagggaaataaaatgaaacgattatacaaaagactgacggcggcaggacttgtcgttgtgcttggaatgacaggaatggctgttatgaatacagctggatgcggcagcagcggggagggtgtgtcctccacggagacgggagaaacggcggcggatgaagcttaccggatcgcaccggcagaccttacgctgtggtatgcggatgacagctatgcagacttttttaccgaggcggctgtgcgttattacgctaagaccgggaaaaaagtagccgtgcagtatcaggataccattgattatcttggaactatttacgataagaccatgcaggatgatgcatttccggatgtttacctcttaccgggggacaatctggaggaagcatacctctatggtcttgtttccgtgaatcagacggatccgtcggaaaacggcgtgctggaaaaggcagtcgaggcggcagcctacgaagagcgcgtgctcgggtatccgctgtcctacgatgcgtgcgtgtttatttaccagacggattattttaccgaggcgccggcatcgctgcaggcaatcatcgactattccaatgagaacgagccggcagagaatgtggaatatctgctggagtgggatgtcaaggatgcgttctatgattttccgtttgtcggcaacagcgtcacgttcgcaaagagaggatcggacgaattggatatcacctacgatgatacgctctatcagcaggatctggagtattttgacacgatactggcatctttttccattgatgcggagcaggtgtccgaacagcatatcgtgaacaatttccgggaagggcggactctttcggcaatcctggatactgatacactctggcagctgaacggatatgactacgggctgatgcagatgccggagttgagcgatacgctctcggcggcaacatgtgcgtctaccgatatgattgtggtcaatgattatacaaaagacagtgcagcggcggcagactttgcacagtttgtgacagtcggcatggcggacgaattgcatggactgtcgggacattactccgtgattccgtcagagacgccggataccgtggagcagacggcgctggacgcgtatgagggggcagttttgatgccggattccaaggatgccaaaaatttctgggtaacattggaagaaacaattttgaaatatttctgaaacactcttgtcacggctgtaaaatttcgttagaatatgaatatcgggcattgaggactccttttatatagaagaaggagaatgcttatgatacgaacatggaagaagataggggctggcatgattctgtgcatttttatggcgggatgtggcagtcagaacgaggtttatctggagacggaagtctcgcaggataccgggaatgtgcaggagacggaagaaacggaggctggggagcgtctggatatactggacgtttccggcggggagcagacgggaagtgtggatctgccggaggtttccggtgaggaatgggcggctgaggcagctcttgcaccggagacgacggaagatgctgataaggcagaccgtgcgtcgggaaaatgttatgtctatgtctgcggagaggtggcagagccgggcgtgtacgtgttagagcccggagaccgcatctatgaggcggtcgagatggcaggcggcatgacggcggatgccgggacgtgcgcagtcaatcttgcggagagcgtatacgacggactcatggtgtatattcctgacagcgaagaagcggccgggatgacgggcagtatgactttggcgggagacggtgtagtttctgcagtaggcagcttgaatcctgcgggaggcagcggtgcgaaagccggcggaggatctgcagaaggcacggcatcggagtccggggaggacggacgtctgaatctcaacacggcgtcgctggcggagcttatgacgctttccgggatcggacagaccaaggcgcaggcggttgtaaactaccgggatgcacacggaggattttcttacgttgaagagattatgaatgtagatggaatcaaagagggattgtataatcggatcagagatcagataaaggtgaaataaatggcgaaaaaagttcttgtggtggatgatgaaaagttaatcgtaaagggaatccgtttcagcctggagcaggacggcatggaagtggattgcgcctacgacggtgaggaagcgcttaagatggcgacagagaatgcatacgacatgattctgctggatattatgctgccgaagatggatggattcgaggtgtgccagcatatccgcgagttttccaatatgccgattgtcatgcttacagccaagggcgatgacatggataagattctcggactggagtacggcgcagatgactatatcacaaagccgttcaatattctggaagtgaaggcgagaatcaaagccatcatgagaaggactgccgcatcgcagcccaggaaagaagaatccaaggtgatcgaggcgggagacttaaagctggactgcgagagcagaaggctgtttattctcggcagggaggtcaatctcactgcaaaggagttcgaccttttagagctgctcgtgaataaccccaacaaggtatacggaagagagaatcttttaaatcttgtatggggctatgagtatccgggggatgtcagaacagtggatgtgcatgtgcggcgtcttcgggagaagatcgagagcaatccgagcgaaccgaaatacgttcacacaaagtggggcgtcgggtactattattcacagaattaatgggtgtacacaatgtctaaatttaaaaaattaaccgattttctcaaaagtcttaagtgcagactgattcttctctgcattctgatcggaattgtaccgagcgtcctgctgcgtgccgggatgctcggctcttatgaaaaccgtgcggtgtcgatccgcacgagtgagattctaagccaggcgaagattctcgccaatcagatcgtttccaatgattatctgaataatgcggagagtgagtctgcgatcaacgtgcagttagagcagctgtcaacgatctatgacgggcgtgtcatgattatcgatgaggagttccatatcataaaggatacctacaatcttgacaccggaaagacgattatttccgaggaagtgatcaagagtatccagggggaggaaatcagcaaatatgattcccagaaccgttacattgaaatgacgattccgttggtgcatgtggacccggagacggagaacaagcggacgatcggtgtgattatggtgagcgtttcgaccgacagcatcaatctgaatctggaatatctggcgcgcaatacgcttgtcatggaactgattgcgatcgtggcgatcatctttgcgggaacgtttatcgcgattcatcttgtggcgccgttccatgccatggcaaagtcgatcgaggagattcagacgggatatggggatgacgcattaaagattgacgcttacaccgagaccaggcagatctgtgaaaagttcaataagatgttggggcgcatgaaggtgttggatgattcgagacaggaatttgtgtccaatgtctcgcatgagctgaaaacgccgctgacttccatgaaggtgctggcggattccatcaacagcatggaggacgcaccggtggagctgtatcaggaattcatgtcggatatcggcaacgaggtggatcgtgagacgaagatcatcaacgacctgctgtctctggtaaagatggataagtctgcgggagatttaaacatcacgaatgtcaacatcaacgaactgttagagcagattttaaagcgtttaaagccgattgcggaaaaacagaatatcgagctggtgttggagagtttccgaccggtcagtgcggatgtggatgaggtaaagattacgcttgcatttaccaacctgatcgaaaatgcagtcaaatataaccgaccggacggatgggtacatgtctctttgaatgccgatcaccagtatttttatctgaaagtggaggattgcggaatcggtattccggaggagtcgttagagcatatttatgagcgtttttaccgtgtggacaagtctcattccagggagattggcggaacgggacttggacttgccattacgaggagcgcggttctgatgcaccgcggagccatcaaggtgttcagtaccgtgggagagggaacgattttcaacgtcagaattccgctgaattatatttcttagataagggagagtctatgagccgagaagcttatcgatggagaaaaaagttaatatgtctgggactggcatgtctgatgttcctgtcaggctcgctcgcggcgtgcggcaggcagacggagcagagtgcctatcatatcgaatatctgaataaggacaagaaccgtctggtggaagaaccttatgagccttcggcaaccgataccgacggaatgatcaaggagttccttgcgaaactgagttcggattcggacaatgtggattaccggaagccgattccaaatgatgtggaaatcacgaattattcactggacggtgtgcttttaaccctgcattttgatgaggattacagcaaaatgagtgctgtcgatgaggtactgtgccgggcggcggttgtccggacgatgacacagatcgacggggtggactgcgtggcattttacattggagacgcaccgcttacggatgcgaaggggaatcttgtcggtaccatgaatcaggacagctttatcgaaaatccgggagagcagatcaattccattcagaatacaacactcacgctgtatttttccaatctggacggggacggtctggtcaaggaagtgcgcgaggatgtctactacagcagcaatatttccatggaaaaactgattatggagcagcttttagacggtccgaagaccaaggatgcaaagtctgcgattccggaggggaccaagcttgtctctgtgtcggtggtggacggcgtctgctacgtcagcctggatgaagcgttcaagaatcaggattacaaagtaaacgaggcaatcgttatctattcgatcgtggattccctgtcggagctttccacgatcagcaaggttcagatttccgtcaacggcgatacgagcggagcctaccgcgacaatttcccgctcgcggatatgtatgaccgcaatatggattatgtcacgggggcagagagcgccttttcggaaacggaggaacctaccgaaacggattaaagggggaagtgtgtgacaaaacggcctttgtgtcttggcgcagcgggcgttctgtcggggattcttgcggcggcatacggctggagcgtattcgcgcgggcattgctagcctgcggcgtcctggcctgcggaatccttggcggcatttttgctgacgggtaccgtccgggcgacgggatttccacggcggaaagaaagagaacggcttttggcgccggagtttttttgctgatgtttgctcttggaagcggaagatatttggaggcggagaagagcaggcaggcgtatctgggagaactgcaggatggcatgtatgtgaccgtacagggacagcttgcgggaaaacagatacagaaaaatcgatatgtctatgaattaacgtcctgtatgtttcggacggattcgtcgaatttcttacagacagaaccggtatcgtgcggtggggttctgatctattctgattccgatgattgttccatcggagatattctcatatatcacggagagattacattatggaagcgggcatcaaatgagggtgcgtttgatgcgaaggcttattattttgcgcgcggatttgattttgcgatggaaggtccggcacttgatagaaaggtgtgtgcgaagaggcagacggcggaagccctctggcagcttggccagcggattaaagaggtctaccttaagacgatgggcgagcgcgatgcggggatactggcgacgatggtcgtcggcgatagggagtttttggatgcagagacgaagagactctaccagatcgggggattgtcgcacattctggcgatttccggacttcatatctctgtgatcgggatggcgctctaccggatgttaaagaaagcgggactgccgtttggcatggctgcccttgcagcggcaggagtgatgtacggatacggcgggatggctggatggggcgtttccgtgagacgcgcggttctcatgttcctgctgtttctgggagcacaggtcagcgggaggagctatgatacattttgtgcgctcgcatttgccgcagtggcgcttctctggaaaaatccctgcctgttctgggacgccggattccgcttttcctttgttgcaatccttggcgtcgtgtgggtcggacagagcatttcttatgagaaaaaagggatgggagcgctgcgcggaaaaatatttgcggcatcggcggtctggtttacgacactgccgcttgtggcatggtacttttatgagattccggtctatgcggttttcgtcaacctgctcatgctgccgatgatgggggtgctgctcggattcggagcggcaggcggaatggtggggctcctgtcgcttccattggcaaaagggatgctttttccatgcagaattctgctctttatggggaagcatatatgtgcgcttgccggtatgcttccgggtgccatgtggattgtcggaagaccgcagtgctggcagatcgcggtatattatgcgtttctgggagctggaacatgcttattgcaccggcagagagaacaaagggaaagggaaaaggaacacggcaggagggcagagcaaaagagtggagggcatccgggcgttttccttgccgcactattgctgcttgccgtgttgggagttccgcggagcggtgaggcggaactggatatgctggatgtcgggcagggggacggctgctatctgcagacgaaggaggggtaccacctgtttgtggacggaggaagttccaatgtcggaaaggtgggcacttatcggattctgccgtttctaaagtacaaaggggtcaaaaagattgactgctgggtggtgtctcataccgatgaagaccacatcagcggactgcgggagatactgtcgtcgggatatcccgtggagtatctggcagtggcggaacagatgccgcgggatgaaaactgggaggaactggaagcgttggcagaggatgcgggaacaaaagtggtgtggcttgggcggggcgacatctggcattttggaaaggcaacgtttacggcactgcatcccggtgaaccggaggccgcgtttgggggtcagtctgtggacaaaaacgaggagtcgctggtgcttttttatcaggaggatgactttaccggtgtctttaccggagatatcggagcggcgcaggaagaggagattctgacctggctgcagaagacaaaaacgggagctgacgtgcagaaaatcgatttttataaggcggcgcatcacggatcgcgctattccaattccaccgggtttctggaggcgctggcaccggagatcgcactggtgtcgtgcagcagaacaaaccggtacggacacccctccaaggaggctgtcgggcatatgcagcaggcggggagccaggtgtattatacgatggaaagcggcagactgtgcgtcaaaaagacggacggacaagccgtctgccgggggtatctggaagaaaaagaacagtggtggcagtgagggaagtttgcggcactggtgaaggtatgctataatgtgcgtaagcaatgagcagtgccataaggagaaaatatctgatgcagtgcttgcacaatgcatcggatatttttgacgaatgatagggcgaatgcccgtcagtccaggaaatctttgatttcctggacgtgcgctgcgtttggaataaagcaagcgccacgcccggacttttgccgaagcataatatgtatatgatgccggagcggctgaaactatttaagacaggaagaacaggacagaaacctttatgaaaacaattgacgaagatatcagatccggaaatttaaaacagatctatttactatatggaacggaagattatttgaaacgccagtaccgggacaagttaaagaacgcgctcactgcggcgggagaggattccgggatgggcggcatgctgtcaggcggagacggcgatatgaactttaaccgcttcgagggaaaggacatcaacccgaagcaggttattgatcttgcggagacccttccgttttttgcggagcgcagagtcattcttatcgagaacagcggctttttcaaaaatgcctgcgatgaactggcggagtatctggcacagcccgctgcaagcacctatttcgtgtttgtggaggaggaagtggacaagcggtccaagatgtacaaggcagtcaagaacgccggaaaaatagtggaattcgccacccagacggaagaactgattacgcgctgggtgctggcgcgcctgaaaaaagagggaaagaatattacgggatcggtgatgcagctttttttgggcaagacgggatcggatatgggcaatatcgaccgggaactggaaaagctgatctgttataccatggacaaaagtgtcattgaggctgcggatgtggaagcgattgcgacagagcagacgacgaaccgtatttttgagatggtcaatgcgatcgcggaacacaaccagcgcagggcgctcgatctgtattatgaccttctgacactcaaggaaccgccgatgcgtatcatgtatctgattaccagacagttccagattctgcttcatctgcgggatatggcgggcaagggatttgacaatcagacgatggcacagaaggcggggattccgccgtttgccgtaaagcggaatctcacccaggcgcgcggttttggcgcagggcagttgagacaggcgttggaggacggtgtggcgctggaggaagcggtaaagacgggacggatgaacgatcagatggcagtggagctgtttatcatccgctacagtgcggcaaagcagaaaaaataagaaagggtacaaaaaaacaccagtatgacggtactggtgtttttatacggttgggttaggaccgtatgtttagatctattctctggaattaagccagcgtgttaacaagctttgttaaacgggaaacttttctaccagcattgttcttgtgatatacgcccttggaagaagcgctctcaattgtggaaatagctactgtaagggcagccttagcagcgtccttatcgttagcagcaacagcagcctcaaccttcttgatggctgtctttacttcacttctgatagatttgtttcttgcagctcttgtctctgttactaaaattctcttcttagcagatttaatgttagccaatctgtacacctccaatttgttatgattatgattctaactggtaacggcacatgcagtgcatcgttacaatgaaatgtacatcgaagccggacacggacagttcaatgtaaacatactatgatagtataggctcttttgagtgacctgtcaagagaaaatgctgaaatttgtcagaaaaatttgcggataactttttttttctgtggcagactagacagaaagaaatgtcctgtctgcaggaatacaaaaaatggaggagactatgtatcagatacgcaccgatcttgcattggagacacaggaaaaaatgcaggaagatcatgtggaacttaagggagtccgtttcctggaggaaaaactcagcccgaacctgacggtcagcacggttgtgatcgagacggagaacggggcaaagacaatgggaaaacccaagggaacatacatcaccatcgaggcggcagatatggatgaggaggacgaggactaccacagagaggtgtccgaacagcttgcgcgggtgatcagacagcttgtgcggttaaaaaaggagagcctctcggtgctgattgccggacttgggaatcgtgaggtgacgccggatgcactgggacctggagtggtggacaatctgtttatcacgcggcatgttgtgaaagagtatggaaaatatgcatttggcaaacagacggtgaaccggatcagcagcattgtgccgggcgtgatggcgcagaccggcatggagacgcaggagatcatccacagcattgtaaaggagacaaagccggatctggtggtcgcggtggatgcgctggcagcgcggagcacgaaacggctgaaccgtacgatccaggtgacggataccggtatcaatccgggaagcggagtgggaaatcacagacatgcgctggatgaaaaaagtcttggcgttccggtcatttccattggcgtaccgaccgtggtcgatgccgcgacaatcgtgaacgatacgatgtacaatctggttaccgcgctcacacagagccaggcgtttgcagcgatgggaaattcattagaaaaattaaacgatgcggaaaaatatgaactcatccgcgaactgctgtcgccaaatttaaatgccatgtttgtgacgccgaaggatattgacgagtcggtcaagagactctgctacaccatctcggaagggctcaatctcgcctttgccggcgggtgtctgcatactacagtttaaagagggcggatggacggcataaaagaaattgccggtgcataaagtaaattatgcatgtttatcgataccagtataaaaattataatagaagtcatgataagagaaaaaagcggagacgaatccttccggtaaccatactgattgtggcggcggcagtgatattatccggcggcgtaagactggatccgggagaactgggttttctgctgcaggaggagatcgtgggatttttcctgccgcaggcttgcgggcaggtgcaggggacggcggagcttacgattgcagaccggcttttcgcgcacttttttttgctcccggaagagagcggtgtatctgccgattatcagacgcaggtggagagtgactggtcctacgaggctattctggcgcgggaggcggcggacgagaactatgtggatgcggcgacgggggaagtcatcatgacgcaggaggcggcggagcaaagcagtacaagcatgccggagggagagacgaaggagcagacgcagggaaccgtaccggaagctgcggagggacagcaggcggaagcacagacggcacaggcggaagcacagatggaacagcaggcggagacacaggcggcacaggcggcggagacacagacagcacaggcggcacagatacagacggcattggctacagaaaaggtggtggtatatccgcgggaaaaactgaatgattttgactatctgattcagaatttttatcaggtggacagcacaacgacgatcaacagcagccagctgaatgccgatgcgctgctgggaaaagatctgcgcctgtcacacgatgcatcgacgccgcagatcctgatctatcacacgcattcgcaggagggctatgcagattctgttccgggggatgcatcgacgtcggtggtcggtgtcggggattacctgacaaagcttttgacagagcagtatggattcaatgtgattcaccacaagggagaatacgatgtgggggacagggatcacgcctattccaaggcaggaccagggcttgaggcggtgcttgcggaaaatcccggggtggaggttgtcattgatctgcaccgcgacggcgtggcggagagtacaagactggttacgcaggtcaacggaatacagatggcgcaggtcatgttttttaacgggctgagcaggacgacggcgatgggggatattgattacctctacaatccttatattgcggataatctggcaatctcgtttcagatgcagctaaaggcggcggagtattatccgggatttacccgaagaatctatctgaaagggtatcgctacaatatgcactattgtccgaaaacactgctgattgaggtgggagcgcagaccaacacggtgagtgaggcgatgaatgcgatggtgcctctggcagatcttttgaataaggtgctgaccgcacagagatagcacgtccggtgatggcgcaaggcacaaaaagaaacgcacttgtaagcggcgcagacgggtgctataataagaatcctcaaaagagaaaaagaggggatacataacaatggaacaatttttgattgactgggaaggaccggtgcttctgtggattcaggagcatatgcggaatgatttcctcacgccggtactcacgtttctaacacatctgggcgaccacggttatttctggattgcgctgacgattctgttccttctgctgaaaaagaccaggaaggtcggcggattgatgacctgttcactgctgctcaatacgcttgtgaacaacgtactgctgaagaatctggtggcgaggacgagaccctacgaggtcgtggatgggctgcacaggatcatagaggcgcagagtgattactcattcccatccgggcatacgggaagtgcatttgcggtggcagtcgttgtatttctcatgtgtcctaggaagatcggcgtgccggtgctggtgtttgcatttgtgattgcattctcaagactgtatgtcggcgtacattttccgacggacgtactaggaggagcgctgatcggagcggtgattgcatatctggtctgcgccgtctaccagagaaaaaccgggcagaagggatcaatatggaacttcgagcgctgaatgacttccttgcgatcgcgcgggaggagaatattacacgggcggcggagcagcttcatgtcaccccgccgatgttatcccggcaaagcgccgatttggaagaagtgccagaagttcaagctgtgttatagaatgacaggatgcatgtgtatatgggagcatcccaaagtttgtgtaaacctccaaactgatgtaagataaaattactcagtttggaggttatttttatggcaagaagaaaagacagcccacaaaaagcagcaatgcgagaaatgatgcgtgattatctgaagaataatgatatcagcatcaaagacggcaccgatgtaaacagtatcatgcgtgacatgatgtctgttcttctggaaggtgctttggatgaggaattggatgaggaattaggttattccaagtatgactatcgaaacaaagaaacagataacagtcggaatgggcattctagcaaaactatgcacacaagctatggagatatggatgtagctattacaagagatcgtaacggtgagtatgagcctcagctaatcaaaaaatatcagaatactgtgactcaggacatggaagaaaaaatcctttccatgtatgcaaagggaatgactaccggagatatcgaatctcacatgcgggaactgtatgatattgatatttctgacagtaccatcagccggattacggataaaatccttccaattgtaaaaggatggcaggaacgtccgttggaagaagtgtacgctgtcgtatttatggatgctatccactatcatgtccgaagtgaaggacgaattgtaaaacgtgcagtctacattgctcttggcattgatatgaacggaaaaaaggacgttcttggtatgtatgttggagaaaacgaaagcgccaagttctggctctccatcatgaatggactaaagaaccgcggagttgaggatatcctgattgcatgtgtggatggactaaatggatttccacaagcaattgaagctgtttatccaaaaacagaaatccagcagtgtatcattcatcagatccgtaattcaacgaagtttgtttcctacaaagatatcaaaaaactgatggctgatctgaagcttgtatatgcagctccaacggaagaaacggcattaaatgaattggaattattcaaagataaatgggattccaagtaccccaagatctataaatcctggcatgataactgggctacattatccacatatttcaagtacccggaggcagtaaggaggctgatttataccaccaatgcgattgaaggcttcaaccgtcagcttcggaaagtaaccaaaagcaagaccgtttttccatcggatgacagccttttaaaaatgctgtatcttgcgactatggatatcaccaagaaatggacaggacaccggcaggactggggacagatccattcccagcttgagatctattttgaagaacgtctggctggacgaaacctgtaaagcaagcttgttttaggcaggtcttattgccatgcccaaaaactcctgtataatgcagatatgggcagaacccggaaaatcggctctgcccatttgcaactattcacaaatcttatatcagcttttgtagtttacacaaaacttgaaacggtctctcaacaatgtttatataagtacctatctgaccagtatcacgagatttgaattcttttattttgacctctactacgacataacaatgtaggtttaggtggtagaataacaaatcaatatattcctctgtgccttctataggtaaagggtattctcgaccgacaaaggcgaacccttttcccatttcaattaaaagattcataaccttttcggtcagggcatcttttaattctttttcgttatagtcacgatttaaagcaataaaatcaaaattgtaaggatcttttgttatttcctgagctaaatcaccggtgtaagctggtagtgttgtttgaaaattacttattgccttgccttggcgttcatatagattagtgtcaaggaagtttagaagaacagctcttgaccagttattctttattacttcatcaacgaagaacattgctttttcgggttcatctttgcatttatcaacaattaattttatatgtccccatggaatggcatatatttctgccccaacttgaggcagatttgtagcctccggtaattctgccccaagttggggcagaatttcaccaaataaattgtagtatcttttcatgtatctcaaattagtggttgaaaatccttttgcacctgggaacatcttttttaaatcttcacttaaagtttcaaaaaaagcaccgccccatttgctttcagcctgcatgttaacgatatccttgccgattgaccagtagaacctaagcaactcgtcattaaccttgatagatgcttttatttgtgtatttttaaatctttttttaacatgtttcagccattcgatataatctttatcaattctaatcatattgtccatagtatttcctccagatatgtcatttattcattattcatctgttttatttttcttagcccttgtcttatagacattatactgattcttgcatttcggagagcagaactcatttcccttacggcttgcgataaatgccctgccacagtgcttacacagcttcatatcgcagtcagaatccgtaagcataaaagaaaagcacatctggatcatgacgagcagggaatggaagttccatacgataaccggggcattttccgctaatgagatatggtaagtcggggatattccgccaaatgcagacataccctgacgatacagtttttttgtctgttcatcaagactgtcgtagtccatataatataagaaacttgtggtaaaggtaaatgcccagtcggaaaattctttcaccagccagtcatagcgttctgcatattctttctgaaaactcatcgtaacagcctgtggattctttcccgttgcaagtgcgattgcaatgccatccttgtcggataccgaccaacttgattctaccccttttttgtgaaaatccatcttatcaaacggataaaaataatcgagataactttctgttgatagagattcttctttaataaaatggttttttggaagatatacagattcataggtgataaattccgcagttgtcggaagtgcagtcataaagcctaaaaatccgtaggaattgatgaaacgaagaaccatacttttcagttcatcttctggtgctttatgcatgacctgcaaaccgatattgacagcatccagtacaagacctgttaagagatgtcaacacaatttttgatttttttgcataagaaataggcctgattattcaggcttgtttcttatgcaactatactatattcttatatatttctatcactcttgcataatagatttgcaaaaacttatttaaaccggctattttggcttgtttcttactttttccttcattctcttttggaagcacggtaacgtgtggagctgactgttactaatcgatcgagggcttgaccaaaaagtttgttggatgatttctgtgtgaagttttgaaggtacaatttaaaaaagtattgcaattataacaattttgttatatagtaaatgacgtactagctacgtcattttgtgtcattttgtatctttcagttagtattcctcgatagctcagtcggtagagcacgcggctgttaaccgcgctgtcgtaggttcgagtcctactcggggagtttttttatcagtaattttgtaaagcgggcatcatttattctgtccgtgcttaaatatggcgacttagccaagtggtaaggcgtgggactgcaactccctgatcgtcggttcaaatccgtcagtcgcctctgtaaagatctcgaagatttcttcgggatcttttttgtttgaaaaccactctgcatctggattgtgtggaaaacggatcgcaaattttttagatttgtttataaaaatataatatgacactgtttagaaaccgtgttaaaattatcacaatatataagagaataaacaggaaaggggagtcagtatgaatgaagtaaaaacaccgaaaaaacctctgatcttctattatgttatggtttttctgctgttgatgatgctgaattttatggcgattccgtggatggcagagcgtcaggtcagggaagtggactatggaacgtttatgaccatgacggaagataaaaagattgcaaaagtcgagatcgatgagagtgagatcgtctttacggacaaggatggaaatatttacaagacgggtccgatgaatgatccggatctggtacagcggcttcatgattccggagcggagtttgcaagtcagattgtagagcagatgtcaccgtttttaagcgcattgctgggctggattgtgccgatcgccattttcatgataatcggccaggttatgtacaagcgtctgatggacaaagccggcggcggcgggaacgcgatgatgttcggtatgggcaagtcgaatgccaaagtatacgtaaagtcttcggagggaatcaagttcacagacgtggcaggcgaggatgaagcgaaggagaatctgacggagattgtggattatctgcataatccggacaagtaccgggagattggtgcatccatgccaaaaggtattctgcttgtcggtcctccgggaaccggtaagacgatgctggcgaaggctgtcgccggagaggcgaacgtaccgtttttctcgatgtcgggatctgaatttgtggaaatgtttgtcggcatgggcgcttcaaaggtgcgtgacctgttccgccaggcaaaagaaaaagcaccatgtatcgtatttattgatgagattgacgccatcggcaaaaagcgtgacggaaatatgggtggaaatgatgagcgtgagcagacactcaatcagcttctgacggagatggatggatttgagggcaacaccggagtgattatcctggcggcaacgaaccgaccggagtctctggacccggcactgacgcgtccgggacgttttgaccggcgtgtaccggtagaactgccggatctaagcggcagagaggcaattcttaaggtacatgcgaagaagatcaaggtatcggataatgtggattttaacaagattgccagaatggcgtccggggcatccggagcggagctggcgaatattgtaaatgaggctgcgctgcgcgcggtgcgtgatggcagagcctatgcgacacaggcggatctggaagagagcatcgaagttgtcattgccggttatcagaagaagaatgcgattctgacggacaaagagaaatggacggtggcttatcacgagatcggtcatgctctggtagcggcaaagcagaccaattccgctccggtacagaagatcacgattattccgagaacttccggtgcgttgggttatacgatgcaggtagaggaaggtacacattatcttatgaataaggaagagatcgagaacaagatcgcaacgctgacaggcggtcgtgctgcggaggaagtggtatttgattgtgttacaacaggtgcttccaacgatattgagcaggcgaccaagctggcaagagcgatgatcacgcgctacggtatgagtgatgaattcgatatggtggcgcttgagacggtgaccaaccagtaccttggcggcgatgcatccctggcgtgctcagcagacacgcaggcacagatcgacagaaaagtagtggaactggtaaaaaagcagcatgagaaggcggcgaagatccttaaggacaaccgcgcaaagctggatgaacttgcgaaatatctctatgacaaggagaccatcacaggggaagaatttatgagcatcttaaatgcacaggatgggcagaccgcggaaaattagagaagctgcgggaaagagcagtaaatattgcataataaaagctgtcacaggaatagaaccgataaaacgggattcctgcggcagcttttttcattattgaaagagctgtacaatgataatcacgatccagacgatcatgtagagagccattccaacgtttaacacggttgtggaaaagcgttttccttttggaagcgtgttcattccaggcaggaagcggattttcttcagattgacgataaagagaataataccggcaatcgccacgccgagcaaaaggaaaatgtaaataaagtaaacgatcagttttccaaagtttcctgtcatgtaggacatcatgcctgcaggatcggaagcgatggagagaaaatcatctcccagccatttcaagatcgccacaccgagtacagagccgaggaagttcaccagcatgtgtaacccgatcgtgtagcggatgttgccggtcttgacatagataaagccgaagcacagaccgagaacaaaagcatagacgaactgattcagatttccgtgaaacagtccgaacatcaggccggagaaaagcacagctacgccctcgccatactgcgcaaggcggtcaatgagaagcttccggaagatcagctcttcggcaaccggggcgcagagcaccatgataaacagatttacccagagattggagctggtagcgacttcaagcatggtattggttaccgggcttcccttcaggatactgatcaactgtgtcaggataagaccgatataattgctcacatacatggcaccatagcacatgagaaaagcaatcagccactgaccgaaggtcatgtgctttttgggaagagtcacagccggaatcctcttgatcagaagcgccatgatcggcatggcgatcacatacataggaatcataacgattaaaagcgcgtaactcgtgctggaaagcagatccggattgatcgcgtttgcgatcgcgcttgcgccgaactgaactccatagatgagcgcggtcccgaccagaaacatcagaccgatgcgggaaaactgtcgtctggcatccgcacagacagtattgggtgtgccggtcatgtaatccggcgtcatttcttcgttcatataatcctccaattccgcagacgttgtgtgccgaagaaaccgggagccagagcttccgtccgtcggcggttgtggcggctttgtgacatctgcggcacaaagagccatgcatttgacaactttacttgtcaaaataattatatgtttgacaagtaaagttgtcaagtaaaataaataagaaaatctttcgagacaaacaatgcatttatcggttataataaaaaggaagattttatcggaggaaaattcatgagaaaattatggataacaggctgtatcgtgatgatctgcatgggaatgctgacagcctgcggtggaaataaaacggaggttgtaccgatcggggatacggaggaagcagaccgggaagtaccttatgcaatgtatattaatcgtgtggaaggcggaaaggcatcggttacgatctcaaattatacggatgaggagattttgtacggaaccgattttcatctgcagaaatatatcgggagcgactgggtggatgtgtcgacgttggttcccaattataagtttaacgagggggtctattccattccggcgcacagcagcgtggtcacggatgtcaaatgggagtggctgtacagcacgctgacggatggggaatatatgctgacgaagacagtgcttgatccgaaggaagacggaacttacgatcaggcaacaatgtatgtgacatttgtttttggaacgccgtaggcggcagatgctgtttattttaaaaatatgacttgacgtgagacaatggttttgttaaaatctctgtgtgtctgatgcggcgctttctggcagaagggatctgtcataaatgacgggaatctgcatataatagacatataagagagatagggcgacttagccaagtggtaaggcgtgggactgcaactccctgatcgtcggttcaaatccgtcagtcgcctttgggtcagtaatggcgtacgagaaatcgtacgcctttttacatgttatcctgttttacatcagaatcagaaaaagaaatgacgttgcgccggggatgcaatgtttttcggaatacaatatatagtacttaaggtataaggaagaccttgaaaaaaagccttcaaatgtatatgatagaactatggagaaaggtcggttttccggggaggggactgtactatggtgcaaaagataaaggattttatattaaaggacgtgcagagtgagaacgagacaaagaagacggcggttacgctgcggatcagtgcattgatgctgtgtctgtactttttaaccctgtttgctgtattctgcgcgattaaggatatccgctcagcggtgatctgcctggtgtgcataggatgttatctcgtgtccttttacacaacttatctgaatcatacgaagtttgcatcaatattttcgcaggcgctgatggcgttatggattctgatttttatctgggagtacggctggaactgcggtgtacaacattttgtgtttgtgcttctggttctcaattttaccgtgagcgcgggaacgatgggaatgaaaatcggcgctgcagcactggcatgtgcgtaccgtatttttctgtatgcctatacgaacaggtatgatccggtgacaaatatttctgcggacaccggtgttctctttcagattatcaatacgcttgctatttttggggaattgacggcaatcatgatcgtgtttaccaaagattcgcaggagatggaatacaagcttgtaaaatataatgagaagctggaacacatggcgtccattgatccgcttaccggcctgtacaaccgctggagcatgcggtcgtatctggagaaaatcgtcggaaaatatgcgtctggagagatcggatatgtgtccgttgcaatcggcgacattgattttttcaagaagacaaacgatacctacgggcatgatgccggggatatggtgttgaaagaactggcaaaagtctttctggaggtaatgggaaaagaaggaaaagtctgccgctggggcggagaggaatttctgtttgtatttcagaataaaaacggcgatcaggcgaatgaggtacttcacgatatattgaagagaattcgcggcatgggcattccttatcagagtgattggattcatgtcaccatgacatttggactggaggagtatagcggagagaaggatatggaagcggtcatccgtgcagcggatcagaagctctatcgcggaaaagaaaacggacggaaccagattgtatattaagaaaacacgggggagaatagacagatgctgacagaaacaatcgcaatacaggtggagggatccctgccgggggcaagactctgtatctacattcaggaaaaaagccgggaacttcggatcaaggagcgaccgctcattctgctgtgtccgggaggaggatacgaatggacctcagaccgggaggcggagccgatggcagtgcagtttctcgcaatgggataccatgttgccgtgctgcgttattcctgcgcgccggcggtgttcccgacagcgcttttagagctggcggaggcgatgaaactgatccatgcacacgctgcggaatggggcgttaaggaggatcagatttatgtagaaggatgctccgcgggaggtcatctcgcggcaagtttaggcgtattctggcatgaatcctggatttctgagagagccggagtgacaaatgagattctgcgtccggcgggactgattctctgctatccggttatcacgtccggcgaatacgcacacaggggatcgtttgaagctctgttaaagggacagaagacggaggagatgctggaaaaagtctcactggagaagcaggtgacagagcacatgccgccggtatttttatggcacacgtttaccgatgactgtgtgccggtcgagaattccctgctgcttatcgcagcgatgcgcaaggtgaatgtgccggtggaatttcacatgtatccggcaggcggacacgggttatccacctgtacggagcagtctatgaatgtggatggatatggtgtacaggagcagtgtcagagctggcttccgctagtgcgcacctggctggcagaaaaagtgcgttgcaaaacagatacaaatgtgttaggatagcaacggattaaaataagaatggaggtggcagcatgactgacgacagttgcggacgaagtaatcatattgtctgtgagggaaaaatgagcggcagtctgcctgccattttttgatcgaagaacgattattgagggtatctttttttcttatgctctgtattcacaggcaatatttccagacaacgtaatcaaatcatgccgaagacaaggagacagccgtgcgctgtctgtatcagaatgccataaatagtgtggcgttcgttatttgcgtgcacattttgccccggcggaatgtgacaacatcggaaaggaaatggtggcttgcatgaaagagcagatgacagaaaaaaagaaactggaagatgtgacggaagttcagatgaaatatcaaaaagagatcgaggcgattgtccgcggaatgtcatccccgaaggtgatgcatgacagacttctggattatcatgagaatgatattgcggcggcgctcgaagacatgaatcccaccgagcggcagcgcttataccgcattttaaatgcggaggagatctcggaggttctctcctacatcgatgaggaggagattccgtcctatctggaagagatggatatgaagaaaaaggcagcagtcgtctcggagatggacgcagatgaaattgccgatctgctgcgccagatggacaaaaaagaacgcgagacgctgacggagctgctcgatgaggaggtacggcataagatcgatctcatcgattcttttgatgaagagcagattggaagccggatgtccaccaactatgtggagattccgtctaatgtgaccgtaaagcaggctatgcgcgagttgatccggcaggcggcagacaatgacaacatatccacactttacattgtagatgagaaccgtatcttctgcggtgcgatcagtctgaatgatctcatcatcgcgcgggaggacacgaatctggaggatctgatcgtggtgtcctacccgttcgtctatgccacggaggagatcgcggactgcatcgaatggatcaaggattattccgaagattccattccagttctggacgaggagaaccggatcatcggagtcatcacctcgcaggacattgttgaggtggtcgatgacgagatgggcgaggattatgccatgctcgccggtctgactgcggaggaagatttggaagagccgttaaaagacagtatcaaaaagcgtatgccgtggctgatcgtgctgctcggactgggactggtcgtgtcctccgttgtggggatgttcgagcacgtggtcgcagaactgacaattgtcatgtgctttcagtcgctgattctcgatatggcgggaaatgtgggaacgcagtccctggctgtgacgatccgtgtgttgatggatgaaaatctcactgccgggcagaaagtgcacctggtctttaaggaagcacgcgtcggacttagcaacggtctgatccttggtatgatgtcaattatcctgatcgggtgttacatttactttttcaagtccggctccctgcagttcgcctttgcggtgtccggctgtatcggagcggcgctgatccttgccatgctgatctcaagcctggtgggaacgctgatcccgatgtttttccacaaaattcatattgatcctgccgttgcatccggaccgctcatcacgacggtcaatgatctggtggcggtagtgacatactacgggcttgcgtggctctttttgatcgagatgctgcactattagtaaaaagaaattgccgcaataagcatatcgtgctttgcgctgataagtaatattattagaaacacacttggggatttcatgtggaaatgcagatggacattcgttggagaaaaatgtgagcatttcttccggctgaatgtctgcatcggatttcgtgtctcttccacgtttggacaatccgacgggtgcatgtccgacacaccggagacaatgggcggactttctggtgtccctaatggcacctcttcacagacaatataaaaccgcgcgaaccgaaactcgttgccatctgctattaaaaacatggcagatggcaattcagacatcggcttcgcgcggttatgttttgttcagaggtgccataaagggacacacacaaaagtcctacaaattgtcttccgggatgcggacatgacccgcggagtgctccaaacttggaaagacacggatcatcgcggatgcagacatttgggcggttagaaatgccacattttttgaaccgaatgttcatctgcatttccatctgaaatcccacggtgtggtcttctaatgatattacttatcaccgcaaaagcggtctatgcttatcgcggcaatttctttttgcgttgatgcacggtttattttacaagaaccttgacgaatttcttcttgccgcgttttacgacaagaccgtcggcaccgaaggaatcagcactgtaggaggtcttgatatcggtgacctttgcatctgcaacgctcacgccgccctgctcaacggcacgtcttgcatcggagcgggatggagcaagctctgtcttcacgagaagtgcaaggatgtcgagatcgccgtctgcaaagtcagcagccgaaagctctacggtcggcatgtgtgcggaatctctgccgcctgcaaagagtgcatgggatgcctcgcgtgccttggcagcttcctcctcgccgtgtaccagcttggtcagctcgaaagctaagatctcttttgcctggtttaactgtgcgccttcccagctctccatcgcgtcgatctcctcgagggggaggaaggtcagcatacggatgcactttaagacgtcggagtcagacacgtttctccagtactggaagaaatcaaacggggaagtcttctccggatcaagccatacggcgccggactgtgtcttgcccatcttcttgccttcggaattaaggagcaggttgatcgtcatggcgtaagcgtcttttccgagcttacggcggatcagctccgtaccgccgagcatgttgctccactggtcgtcgccgccgaactccatgttgcagccgtatttctggaataaggtgtagaaatcgtagctctgcataatcatgtagttgaactcaaggaagcttaagcccttttccatacgctgcttgtagcactcagcggtcagcatgcggtttacggagaaatgagcgccgacctcgcgcagaacatcaatgtaatttaagtccatcagccagtccgcgttgttgaccatgagcgctttgccgtcggaaaaatcaataaagcggctcatctgcttcttgaagcagtcgcagttgtgctggatggtctccggtgtcatcatctggcgcatgtcggtacggccggacggatcaccgatcatggcagtaccgccgccgattaaggcgatcggcttgttgcctgcctgctggaggcgcttcattaagcagagcgccatgaaatgtccgacatgcagactgtctgcagtcgggtcaaacccaatgtagaaggttgcttttccgttgttgatcagttctttgatctcttcttcgtctgttacctgcgcgattaagccgcgggcaactaattcatcgtataatgtcatgatgtcagttcctttctttgtggttgtagttgtggttgtctttttctggcggcggtacaacagccgaacagtgccggaccgttgctgccgcacaaaaaacccccgtccttcaaaaaggacgagggtataaactcgtgttaccacctttgttcacagaccattcacacggtctgcctctgcgagtgtccgacaacactcaggcgcttgtaacgtgcgccgctacgtcacagcctactatcacatcaccgcaaaaagaacggtcatgcaaattgggtgtgaagctcggggatgtattcgtaataagctttccgtgcacctctcatcagccggttgctttctgttcgttccacttattcttacttcttcccgtcaaagcctgtgttctgctccgattaacgccattatagacgcggccgtgcgcatttgtcaaccggaaaataaatattgtgtataattgcgaaactttttcccaataataccagcatagaaaaaaataagaaaagaggtaacaacgatggtattaagtgaaaaagagacagcggcgatcaaagatctccagacccaggagaaaacctgcgtggagaagtattcccgatacagcaaagaggcgaaggatccggttctcgtgaacctgttcaccgatcttcacaagaaggagcagcagcactttgactcgctgggacaggtgttaaacggtaccgtgccgaactgcaactgcaacgacagcgatggaaagaattataacccgactgccacctactccctcgcggagtccgaggacaagaaaaacgactgcttccttgcgactgactgtatcggtaccgagaagctggtgtcttccgagtataataccgacgtgtttgtatttgccgatccgggcgtccgcaaactgctcgcagacattcaggtggaggagcagaatcatgcggagatgctctataagtataagactgtcaacagcatgtcataaagcagacaaagtatcatgtataagagaagtcccggtgcaaagagttccgcacgcggggctttttttaacttataggattggggtgtcaaaaggtttataacctttgatataaatttgtaccttgaaagcttaacacgatatgtaaaaacattggattctttggtaaaatgcaggcagcattttatgaggtcatccatatgtcttttgttaaaaatgataatcaacagcttactgttttagacagcacttttcatcttacagacagataaagttgttcctgctattgatgaaaatattttttctgttctttacagtgaaaaagcatccagacctaatactccggtcaatgtgattgttgggccactgattcttaaagaagctcttaatgttactgacgatgagatcgttgaagctagggtatttgatatccgctatcagtatgcgctgcacacaaccagttttggagagcagccaattagtgacagaaccctcaccaggtttagagcaagagttctttcttacgaaacagagcatgatgttgatcttattcatgaatgaggggtcaggagagttgagagtgtcgagggcactttttttatgtcagtggtctggtgctttctccctggatgataacaggaagcgttgtatagctttggatgagaagctccgggttctgaagcttacggatcatcatggagcctgcctgcacaccggtatcatagacattgatatctacaatggtaagctgtgggtcgatgatgctggaatatgggtagacgtcaaaggtaagtatggcaatgtcatccgggatggaaagctgccggtctttgactgcctggatgacacctaatgcgagggtgttattttcacatacaatagcgcgaggcggtacaggctgtgtcagcatatcagaagtaacagaataagtgtgctgccaactggaatcggtatttccgatacgggcagccggaatgtgaaagcctctgtctaacatgcctgccataaatcctttttgacgctgggcagaaatataatcggttttgcgctctccgataaaggcaacatctgtataaccacaggctatcatgtgggcagcggcatattcaccggcaagggcgtggttggtatctacccagcataagcagctttcaaaactcggatgtccaatgataatgtgtggaaagcctgcatccagaataagatttgcaatttctttattaatggcagagccgtggatgataagaccatcggaggaacggcttgtgataacttcgctgactttttctccgggatagtgctcttcagaagtgttgacaagcgttagggaatagttgttttcggacaaggtatggtgtacgccgcacataatgtcaaacatatgcggattccgataagcagtatctttctccagattggtaagatagacaatattggaagtagcaccttttgcaaagtttacagcccgggagttaggggtataatgaagcttttcaattgctgcatgaaccttttccacagtggctggggatatggtggtccagtgatttaaaactttagaaacagtggatttggaaacaccggcttcattggcaacatcattgatggtaacagacataaaatacctcctaaaaaaatgtataaatttacaaatacaatatagcggtttcctaacaaagtcaatcatttttgacaaataaacattgtaaacaatgggaagaagtgatagatatagacttagcaagaggaacaaattgcatgaaaaaaagaaaataaagaaaacggtttcctaaagaaaccggaaaacggaggtatttttatgaagaaaagggtgttgagtctgttgctctgtaccgcaatgacaatcggcgcattatccggttgtggaaaagatgcaggaaaagacgaaggacagactacagaagtgtttggaaatgatgcaggggatgaaatgacagaagtaaaaatctggcatgatggggatgagaatatcatgcagaccattgcagattgtgcgaatgagaaactggcagaggataatatcaaggttacctttgaaaagaagagtggtctgaccgaccagcttcagttatatggaaatgatgaatccaacggaccggatatgtatctttatgcacatgattcattgggaacatttgcagaaatgggaattttagctccgattacggatgttatcagtgaggatgtaatggcagatttattaccgatgaccgtagaagcaggtaattataaggatacccagtacctgctgccggtttattatgagacattgctctttatgtataataaggcaagatgggaaggtgatgtgccggaaacaacagatgaactgtatgattatatggtagcacataccgatgtggatgcaggaacttatgcactggtaaatcagcattctaccgcatacaatgtggcaccggtgatcaatggttttggtggatatattattgataaggatgcagatcctggattaaatacaaaggaaaccaaggatgctatcgcgtacaatcagaaatttgcagcattggaggcagatggagattacaacacagtaactgcattattcaatgaaggtcaggcagcagcaatcatcggtggaccatggctggtatccggaatcaaggcggcgggcattgaccttggtattaaatccttagcggattttaaacttccgaatggaaacggactggcaccatattctggtgtacagagcattggtgtcttaaaatatgcagcagaaaataagaaagaagcaattgcaaaagcattagagacaattgcaagcccggaagtaggtattgcactggcgaataaatcaaactgtgcaccggcaaacagcaaagcatatgatgatgcagatgttgctgcaaatgagatgattatggcaatgaaagcaactgcagaaactgcacagcctatgccaaacattcctcagatgagcgttatgtggggaccggcagaagcatttttggcggcagtcaacaaatccggggaagatattgacactgcagcagaaacttatcagcaggaggcattggatgccattgctgatatgcagtaagaaggagtttatttagaagcaataaagaggaaaatcaggaagagaagtgtgtatatgaagatcaaacggaaattaacaccatggctttacagtatgccggcgctgatattgattggaatggttattgtattcccaattatttatacgggttatatatcactgaccaatatgaatctttttcactggtcaaattatgaatttatcggactatccaactatagcagggcattattaaaggcagactccggtttccttggagcactgtttacaacattactttggaccgcattaaatatggtgatacaggtagttgtggcatattttattgcattgggatttcaaggagaagatttcaagggaaaacgtgtatacaagacccttttgatgtttccgtgggcaatgcctgcatatgtgtccattcttttgtggagagtaggcatttataacacagagtttggtcttctgaataagattctggtggcacttggctttggaaaggtaaatttcctttccaccaatgtgccggcatttctctcctgtatgaccttaaacctgtggatggcattgccgtttatgattatgatgatagacggtgcactgtccagcattgaccgcagctattatgaaagcgcagaactggatggagcaggtttctggtcaaagaacatccatattaccgttccggcaatgaaaggaattattgcaccggcggttattatgacgacatttaccacatttaagcagtttgatatcgtatatcttcttacgatgcagaagggagcatattcaggagcaaccttacaaaccgtaattacctatgcacagcagaatgcgtttgtttcaaataactatgggctgtcctctgcggtatccatgattatctttttcctcatcatggtattttcgctgtttaccaatcgaggggtaaaggagaaaaattatgactaagaaaaagagaaaacagattttacagcgtagcggattacatattttttatattatactgtgtctgctggcactggtgccgattttatatgcgttgaatctttcctttgaaaggggaagtggagcattgtcctctggattatctttgtttccaaaggaatttacactggataattataaaaatatactgacgcagaagccgtttttgcggtggttttataactctgccgtattaagcttctttacaatggtcattgctatcggatttgccgtggtgtcatcttatgcattttcaagataccgttttaaaggaagaaatggcattttaaaattactgcttctcttaaatgcattcccacagatcctgtccatgtttgcattattccgtcttttaaaacagatgaatatgctggacacgaaactgggactggtgattatttatgcgggaagcatgtgcatcttctctatctggaatatgaaggggtattttgataccattccggtagaaattgaagaagcatcgaaaattgacggtgcatcggatttccagctgctgtggaaggtagtaatgccgctggctcgtccggcaatcattgtaacttctgtgatggtacttatttttgtatggaatgaatatctgttttccacaacatttctactgaatgaaaacagttatacactggcaggtggattatatcagttacagtccagcgattacaccagaagctggggaatgttttccgcagccgctatcctggtatctgttccagtgctgattattttcttctgtatacaaaagtatatggtatccggtcttactgcaggtggtgtgaaaggatagaaataaaatggaaaaagaagcaattttgcatattccactgtcacaatttgcctttgcagaaaaagaagaccggctggtaataagaatccgttgtaaaaaggacgatttaaaacggtgcgtgctgtattggggagaccgggtggcgatggaagagccacttccggtgaaacaaagtgaaatggaacatgtggcatccgatatgctttatgattattatgaagttaagattacatctccgtataccagggtatgctattatttccggttagaggacgatacagaaagcctttattattatggaagaggatttgcagagaaactgtcctgtggcagggcagaatattttcagtttccatatattcgaagagaggatattttagatatcccggagtgggcagaagacattgttatgtatcatattttcccggacagttttgcaaatgacagacgggaactgaaggaaaaagcgacaaggcatatgcttttgccggatgaaaaaagcgacagcaatggaaaaattttaccggaccggatttgcaagaatcatctgggtggtacactgaaaggaatttgtgaaaaccttgactatatcgaaaagcttggaattaactgcatttatctgaatccgatttttgaagcggcgtcttatcataaatatgataccattgattattttgaaatcgacccctgtcttggaaataaagtggatttaaaagaactggtgcagcagtgccacaagagaggaatccgtgttattttagatggtgtatttaatcattgtggagcagatttctttgcattccgggatgtgcggcagaagggaaaagcatcaagatattataactggttttattatctgccggaaacgatacagtacgctgatccgccggattatgaggcgtttgcctatgtaaaggaaatgccaaagcttaataccggaaatcctgaagtggtggagtacctttgcaatgttggaacttactggattcgggaagcagacattgacggctggcgcttggatgtggcaaatgaaatcaatcatgaattctggagaaccttccgtcatgcggtgagagcagtaaaagaggatttatttctaataggcgaaatctgggaagaagcaggcatctggcttcagggagaccagtttgattctacgatgaattatactttttcttatctgtgccgggatttttttggaaagggagaactttcggtcagtgaatttgatgcccagatgcagcagatgatttaccgctacccatggcaggtgagtcttgcacagatgaattttctggattcccatgatattccgagatttttaagctattgcaatggaaatagaaagagaatggagctggcatttttctatctctttatgggagtgggcgtgccatcggtattctatggggatgaagtgtatatcgagggaatgaaagagctggagtatcgggcagccatggactggcaggcagtaatggagcagcagatagaaaacaacagattacagggaaatctggcagagaagttcagttgctggattgtactccgaaaagagcatgtggcgttacgcaagggcaattaccggacaatttactgcaatgatattacaggagcatatgtattttcgcgtagttttggggacgacaaagtcctgatatttttaaataccggcaccggcagtgtgacactgacatcagtggaagttccgcagttgcagaaagaaaagataattctttcttcctatgagggaaaacttttggctgttttgtaaaaacaaaagatatttctataaatagtatcgttctttaaaaaagataagagacatctttacatacgtgtgctatactttggaaaagaatacatgaaagacaaatggggaatagaagtaacggatggaaaaagtatacttttcaaaagaaatcagcccggagaaggtattagagatgtatcagcttctcgggaagaagctggacggcaaagtggcgatcaagcttcactccggtgaggcggggaaccagaattttttaaaaccggaattctggaagccggtcattgattacgttggcggtaccgttgtggaatgcaacaccgcatacgaaggcgagcgtaatacaaccgccaagcacaaaaagacgctggaggcacatggatggagccggtactttaaagtcgatcttctggatgcggaaggaccggatctggagcttgcgatcccgaacggcaaagtcattcagaagaactttgtaggaaaagaccttgcggattatgattcgcttctggttctctcccatttcaagggacatccgatggggggatacggcggagcgctcaaacagctttcgatcggcattgcatcttccgccggcaaggcatatattcatggtgcaggaaagccggaagatatctggacggcagaccacgattctttcctggagtctatggcggatgcggcatcttccgttgtcgattactttaaggggaatgcagtttacatcaatgtcatgaaaaatatgtcggttgactgtgactgctgtgcagtggcggaggatccgtgcatggaggatatgggtatcctgatttcgacagatccgattgcaattgatcaggcatgccttgatctggtctatgcgagtgacgatccgggcagagatcatctgctcgagcgaatcgaatccagacatggcgtacacaccatcgaggcagccgcagccttaggtttcggaacccgcgagtacgaactgatcacggttgcctagaccgggaatcagcgaggtggcgaggcagatatggcttcattaaaaaaagataccgcatactatcaccttccggggctgtttgagttttatgaactgtacagcgtgtttctgccactgttctatgagcacagggaatatttttacgactggtgcgacatcggatcgatctatggcgcaccggcggactgtctctggggcggaggccgcgtcgggttcggagatcatgaccccgcggaggtgctggcgctgctgagggagtacggaatctctgcccggctcaccttcagcaactctctgcttcgggaggagcatctttcggaccggaaatgtaatgctctgtgcgtcctgtttgaggaaggcggggatcaaggaaacggagtgatcgttcactcggatctgttgctggcgtatttaaagcagcagtatccggggttctactttgtctcctcgaccaccaaggttctgacggattttgaggatcttcggggggagatcaaccgagaggatttccgctatgtcgtgccggatttccggctgaataaggcgttcgcgcagtgggatacgctgaccggatggcagagggacaaagtggaatttctgtgcaatgaatgctgctggtttggctgcagggacaggaagcgctgttacgaagccgtcagccgcaaaaatctcggagaaagcggcgcggagcatcactgcgcggctccggatgcagaggacggctatctgttttccaaagcgatggctaattcgggatttatcggtacggacgccatcaaaaatgtctacctgcccatgggattttcccagttcaagatcgaggggcggggacttggcagtgcgctgattctggagttccttctctactatatgacgaaacctgagtatcagctgcatgtcagggaaaagatttatctggacaatatgctggatctgttctgagcggcagcaatgggcggcaggcgggaaatggcactgtttttcaaaaaaacagtgctttttttgcgggaagatgttaagatggtcagataaacacaaaagagatcttcatagaaggaaaaaacttatgaaattagcagaatttaagggaaaatatatcggagaccgggcattttataaaagatatttatatctggcactgcccatgattgtacagaatgcgatcacgaatctcgtcagctttctggataacatcatggtgggacagcttggcacggaacagatgtcaggtgttgccatcgtcaatcagctgatttttgtatacaatctggcgattttcggagcggtttcggcagccagtattttcggggcgcagtattatggcaaggggaatcacaggggacatatgtattccttccgctttaagctatatgcggcgctgcttgtgacggggcttaccattctgctgtttctaacatgcggggacaatctgatctcgctttatctgacggataccgccggaaacggggcgacggatgtggcgcttggatatggactccagtatcttgggattatggtagtgggactggttccgtttgcggtcaaccaggcgtatgcgacgaatatcaaggagacgggacagacgatggtgccgatggttgcgagttttgtcgctgtgggaagcaatgcgctgttagattatcttctgatcttcggaatcggaccgttcccggagcttggtgttgccggcgccgcgcttgcgacggtgattgcacgctacatcgaggcgttcatcattattgtctgggcgcacagccataccggacagaacctgtatttaaagggcgcctataccggatttggcattccgggagaggaattgaaggcgattatcgtgaaaggatttccgctgatgctcaacgaggttctgtgggcggcgggtatgacagcggtcacacagtgctattccgtccgcggactggaggttgtggcaggattgaatatcgcgacgacaatcacaaacctgttcaacatcatctatctgcagcttggttcctgcatcagtatcgtggtcggacagtatctgggcgccggcgagctggaagaagcaaaggacgcagacaacaagatgatcgtgttcagtgtgttctgctgcgtgatcgtggcaggtcttatgctggtggtcggaggatttttcccgcagatctacaatacaacggaggagatcaaggcgcttgcgacaagcttcatcgccgtatcggcgatgatcatgccgttctgttcgttcagccatgcgtcgtactttacgctgcgatcggggggaaaaacgatggttacgttcctgtttgactctgttttcacgtggatcgttgtcgtgccggccgcgtttgtactggcacgttttacaggacttggcattgtgagtgtgtactttctggtgcaggcgaccgagctgattaaggtggtgatcggataccgcatggtgcggagtaatgtatggctggtgcagatggtgtaaaggaatggatttgttcggttgcaagatctgacagatgatcggcagcatgaagtcaatgtagaaacaataggcggtatcacgggatgaaagattcgtgtgttaccgcttgttttatgctaagataaaggggagagcagcagtgtatggaaaaacaggcacatacggcagcggaaggatagcagaagatggatgaatttgaaaaagaatgtcagctgattatatttatgccgcaacagcggcgaaatacggagatccgctgggaccaacctatgacatgctgcgcagaacgaagaactgccgggagattatcgaatccgcttccagaccgaatgaaaatctggacaaacgattgacgttcgacggttttcaggcgtggtatctggagcgggcagggcttttaggggaatagcgtggaaagcggaaattttaacaggaggttgagtttatatgaaatatgcaggtatgccgatgggcatgtggatgatttttcacaaatcttttcaaagaaatctcacagaggttttgaagtatgatgaagaggaaagcaggaaaattactgctttagcaaagaaaaagtacagagagctcatagagagacttccggaatttgagaaggcggacagattcaagatgaatatcgtgaattgtgccatgctgtctgcatttttcctgaatatgccaacacagccggagctttcggacgcgacgaagtattataaaaagtccatgatgacggggatgatgcagcggttttgcaggatgagcgggaagaaaaaatattcggagtcagatatcaaggcaatgaaggatacggcaaaactcaaagcgggcgacagaaatccgtattcgtggaatatggacttttatgagtatgaagacggaagcggatacgaggcaagatttacaagctgcggaatctgcagacttatgggagagttggggcttaccagtctgatacctgcgatgtgccgtctggattatacaatgagcgaagcaggcggtgtgacggattttgtcagggaatacacgcttgcctccggcggaccttattgtgactgcggctataagaaaaagtagaccgtttatttaggggatttattatgatcagcagattacagagtgaatacacaggcagggttgccgagatatggttagagggtaatttaaacgcccattgttttattccggctcaatactggagggataactttgaactggtaaaggaactgttgggacaggcagaggtttacgtatatgaggatgcccggcagatacagggattcatcggattaaatgatgaatatattgagggtattttcgtttctgatgagatgcggtcgcagggaatcggaaaacttttactggattttgtgaaaaacagaaaagcaaagctaagcttaaatgtgtatcaaaagaacatacgggcgatccatttttatcagcgggaaggctttgcgatccggtgtgaagggttggatgaagctaccggtgaaaaggagtatgtgatgacgtgggaaaatttctataaccagagatgatggaggggtgtatggtacttgatttttactatttttcatatcaatgtctgttgaatgacaacatgatccggctgttaaatgaatatcgggataaaatagatatcaatctatatgacatttccaacaatcatttattggcgggagaaatgaagatgttttttcccacactgattgttctggataagaaaaaaagatactatagtccgctcaggaagtcttttctggagcaggcagcaaacggaatatatccggaggagaaaccttttttaccaacaatatccagaaattttaccaaagggatcatagagccgctctccttagacaagttcgacatcgcctgtgagtgctgtggggacaaaacgtctgaaaattgtaaaaagaaaatagaatttctaaaacagtacgagctggatatctatggttttattcataaaaacgggaagggagagctcgttggcggtgtggaatacctgcctgcgaaggtcattccatacgacattccacacgatgatgatatagcgtttctgacttgtgtatacatgacggatgcagcctatgattataaaagtgctccccttatgaaactggaaaaatatttagcgggcgaatataaaagaatccttgcaatatccgatgaaaaaggcgtctttccaaatggggatttggacttttttatcagcaatggatttcaggatgaaggtgtcatttttgaagatgaaaattattgcagattacatttggtgacgaaaaaactgtgatgaagaggttaaagcagcaggtttgagggcggtgtcagacggtccgtatatttctcacagactgtatagtagaaatagtgcaatttttgtatgatattatacaagaaatatatgcaaatatatcgtattattgataatatagattacgttagcgtataaggagcatctgaggagaaaatatggcagctgaaagaaaaacattgacacagctatttgtgccgatatgcgtagagactttattttatatgctttcaggcatggttgatacacttatgttatcatctgtaagtgaccaggctgtgggagctgttggaacagcaaatacatatataggcgtttttatcatcatgttcggcgtaatatcatcaggtatggtagcggttatgtcacaaaatatcggagcgggaagacctggagttgcatatcaggccagacagcttggactgatgtttaatgcagtgatgggcatcctgatgtctgttattcttgctgttttttctggtggaatacttagaatagtaagtattgccccggctttgtttgagccagcggaaacatatcttaaaattgttggaggcgcatgttttttaaatgcactgattcctatttattccagttatctgagagtgtttggatatacaaagcactcactgataggaacggttgttggaaatctcattaatataatacttaattcggtatttttgtttgtgtttaactggggagtaatgggagttgctgttgccacagttatttcaagggttgtaaatctaatgattgtagcaggcatgggcgcggtacttataaaagcaaagcagagcccggagcgaattccgtcccggaagatacttgcgcagatcgttaagataggttttccttctgcattagaaacagcgctttataatgtggcaatgacactgatagtacgatttatgaatcagatggatgcggacggaatgaatgttacagcacgttcgtatactatgcagatagcaaatttctcgtactgtataggagctgcacttgcacaggccaatgctattatgactggctggagaattggggcaaaggagtttgaagaatgtgacaggggtacgcggaaagctgtgatatatggtcttataacagcaacgtgcttctctgcggcatttgcaatgtccggacattttatcattcatatatttacggatgacacacaaatgataaatcttgtggtaaagctgttgatagtagatatatttcttgaatttggaagggtgacaaatcttgtatatggacaggcgttaaaaaccagtggagatgcaattttcccggttatcatgggtgcgatatttatgtatctgtttgcagttggcggaacgtattttcttggaattcatatgggacttcaggctgtaggagcatatattgctatggcagcggatgagtgtgcgagagctgttggaatggtgtttagatggaaaagcggaaaatggaaaagtaagagtcttgtagaactgtaggagagaatatgtactttgaattgaaggaaaacaaaccacatggcacaaaggacgatccatttagcacatatcatatagagaatgcggggcgctcatttcagataccggtgcattggcatgatgaatttgaaattatatatgtaagaagcggttttctgacggtaagtatatccggagagagctatattggaaaaacaggagaagcgtttgtggtgtcgccgggcaatctgcatcttatgggatcacagagcggtactgtggattattataccttcctatttccgttaaagtatatatcttttcgtacagatgacatgttagatgaaaaattgcttgaaccattaaatagcggtcacttgatgatatgtccaagagtaaatgatacagcaaaagaactgtgtgaacagctgattgagatatatgaggcaaaaaacgatgaaagtgagtcaaaaataacgacacaggtcaggacaaaaataattcttttacaatttattcttgaaatgtggaagaaaggatttgtaatagaaaatgatacaagtggcagaaatacagtagaaaaagagatggtttcctatatacagcagaattttacaggaaagatatcgctgagggaatttggggaacagtttcatctctcggaaaaatatatatcgaggtattttaaggaacattttcatattacactgtcacaatatgtaacatacctgcggttggagcatgcaaagcagctgttacaggacaccgatatcccggttacggatgtagccatgcagagcggctatcagaatgtaagctattttatcagaagtttccagaaggcatatgcggtatcaccgctgaaatatagaaaaaataattatagcagataaattgatacaggaagcacagtagagtttctatgatgccacgattattgataaatatacgatcgggtgcaagaatagcagccgatccggcggctataggaaggacaggtaaggtgggagtcgaaaaaataaagatacttttttccatataacgtttaaaatagcttgattccatccccaaaacaacatatcatgtacataaaagcaatcgtgaagaggacaggaaaatatgagcgcagaaatgataaataaccataaaaaagtggtgtttctggatgtggacggcacgatggtcaatgaccggggagagataccggaatctaccaaagaggcggtccgcagggcgaaggcgaacggtcacaagatggtcgtctgtacgggaagaagccgtttccagatttatgatgagctgttggaacttgggttttccgggattgtcggcgcggcaggcgtgtttgtgatcgccgatgggaaggaaatttatcacgcatatattgatgaagagcacaggaagagcgtttacgattatctggagggcaacggattcctgttttgctatcaggcggacgacggtgtggtgttgaaccgccgcagcagtgaaggaatcttagagatctaccgaaagatggggatgagcgaggagcgccttgtgcgtctcactggaaacatgcatctgacggaagagccttggaagaatccgagaaatgaaaagcttctatattataatgcgccgtttccggtggcgaaggtacatgcagatctggagccttactttgacacggtggcgatcagcctggaaggtatgggagaatatgcgggcgagatcggcatcaacggaatcaataaggcaaccggcatggagcgatatctgaaggcggccggcattgcgagagaggattccattgccgtgggagacggtccgaatgatcttcagatgatggaatacgcaggaatcggtattgcgatgggcaacgcgcgagaagaagtcaaggaacgggcggacatggttacatcgtccatcgacgacgatggaatttatcgggcatttgaaacattgggattgctggcatagaggatagtgctatggaaaaaagaaagctgcggatactgacagtcgttgtatttgccggtgtgctgatatttggtgcactgcgtcagaacagtacgggaagaggagaactcggagagattcaggttgccatgtggaatttgggaaaagtggacaatctgcagctttcctatgaatatcgctggaagcagaacggaagcgccggaggagagacgatgcatgcctgggcggatatgctgacaggtgactggataagcgaacactacacgacggatgaggacgggacaagactctatttaaagcagttctgtgacgggaggaatctgtatcattacattgactggagtggtgagtgggagcagatactgccgcagcaacgggagaacaccgtcattcctgattacgaaatggtgacggatctgggttacgacgggacagatgtggaagacctggagcgtgtcacagaggacggggctgtggagattacctgctcttttacgcaggaatatttagaggaggcatgggagaatcaggtggcacaggtggagaagtcctatgctttttatgaaaaaagcggggcggacgagaatgcggtgaagacggcggcactctccgtcgagcagcacaagcaggcgcattacgaggatatgacggcaacctatgtgatcgatgagaatcagattctgcgaagcatggaatatcagattacgctgattatgccggagatcacacaggatctttctggcaataagatgcttggaaaagaccgcaagatgcagattacggtgacggcggaagtcgaccgctacaatcagggcgggattgccaataaggtgcagcagtataagacactggtgcaggaatatatggagtaagagaaaaagccgcgcagagagataatctacgcggctttctttgttttatagagcgtattctacggtgaagggattgcactttacgggtcggtgaactaaggtgtagctataaagctgcagctttacaaaagcatgacaggtccctcggaacggtggacagcgacctgtccggaaaatggaggaagtatatggatcagacgaggatcggaacatttatcgcagtattgagaaaggaaaaaggtctgacgcagaaagaactggcagaacagattggcatcagtgacaagacggtatccaagtgggagaccgggaacgggatgccggacatagcatatctgtcgccgctctgtgaggtgctggacatcaatgtaaacgaacttctgtcgggtgagaagcttccttccgaagaatatcttggaaaggcggaagaaaatatgaaacatttaatgcaggagaatcagaataataaaaatgcaggcagatggcaggggctggtgggaatcgcattgctcgcagtggcagtctttctggcatttggtttgtcgcaggcgaagatcgggtggtatgtggattgcccgtccatcatccttatagtatgtatctgtgcggcgtgcgtgcttttcagtggctgccggacaaaatatgaggtggttcatttcttaaggaaaacagtgctgcccgccggtctggtggctatggtcatcatggttccggcattacttcattctctttcagatccagctgccatcggaccgaatattgctgtgatggtacttacgcttttgtatgcggcggtggcatatcttgtactttacgttgcagagacacgtatggagcgcaggaggaagcagaactagcgcgccgtctctgcggctatgggaagagagcccctgatggctctccgtttcacagacaatataaaaccgcgcgaaccgaactcgccggcatctgctattgaaaacagggcagatgccgactcagacatcggcttcgcgcggttatgttttgctagacaacaggtggcatacggtaggcggaggctgggcagttattgtaatagccagtcagatatggtaaaacagtctaacaaatcgaagtttgtaaggaacagaaactttgaagtttcgattgagaataaatgacataattcctaaagaatattggtggctatgtggtaaaaatagggatacttggaattggtaggattgaataatggaatgtaaggtatacaagtttgcacatattagtaaaaaagaaaaaagaaaattacgaaaagcatattatcggaaacaatggtttgatatttcaatttcgtatctatttatactgatgtcatccggtaaggcctttctttcgttaaaaaatggtgcattgtgggtgttggtatggtatacatgttctttattattatcatgttatgcatatgtaaatcaaattgaatataatgtcggtagaaaaagagcgaaacattattcaaaaaagcacccgaattgtacattgcaaaaatcagttagatttagtccagaaattggaggctggaatttattggcaattcaatttctatgtgctcttcctttaacaattggtttgggaatatttgctttcgtatatcaaagttttttttatgaaacgtatatgatgaaatataaagatttttgtataggacttgcactcgatacatatgttctagtgttttttcttatttatttcaatggtttttggagtgaattgagagatatacatggagtgaagaataagattaatgcattcttagttacatttcctggttctaagtgtaaaaatatcatagtacatttagctgccattgttatttgtgtatttgcgttaaggcattatctgctaaatgaattttcaggactatttaatgaagttgtaagaaaagtaattggtatagtgtatatattgtatatgattcttccaatgaaagaaatcaaggattattttcgtgaaataagcaaaacgagaagaagctagtattatttaataaagtcatgctcggttaattgagttatagctttttgtattccaaactatccaaaatgtgtgcagtttgggagcgtaaaattccagtaatacgctctgttgatgtgctgatttttctacgatatactccttcaaaaaggagtgtgctcttatgggtagagaaatttatgacatcatcaatgacatggcagaagtattaaatgcatcgcagatgcagaaactacaagaggtgttggtaaaacggttatctgaaaatactgtatctgattatttgcagacaacgaatatggactttctagatatgtttttaactgcaaagcatttagaagggtgttctgacaaaacaatacgctattataggtgtaatattgaaaagatgttggatacaataaatattccggtcataaagataacgaccgagatgctacgaaaatatcttgtagagtatcaaacgataaataattgtggaaaggtaactattgataatattcgtagaagtctttccacatttttttcgtggctagaggaagaggattatattataaaaagcccaatgaaaagaattcataaggtaaagactggcgttattgtaaaagataccattccggatgagaaaatagaaattcttagagataattgtaataatctgcgtgatagggcaatgattgattttctgctttcaacaggaattagagtaggcgaattggtaaggctgaacattgatgatatagatttctctgagcgggaatgcgtggtttatggcaaaggagacaaagagaggaaagcatattttgatgctaagaccaaaattcatttgttgaattatattgaatcaaggacagataataatatagcgttatttgtgtcgttaaacaaaccacacagtagacttactgaaagcggtgtggagttacgattacgagaaatggggaagaagttaggtgtagaaaaggtacacccacataagttcagaaggactatggccaccagagcaatgagaaaggtatgccgattgaacaggtacagaaaattctgggacatgagcaaatagatacaacgctcagatatgcaatggttaatcaaaacaatgtgaagctatcgcatcgaaaatatatttcatagattgacttgtaacgcaaaagacgttacaataaaagaaagatggaggtgtattctatgggaaaaacagcaacattaaatataagagtaaatccagatgtaaaagaaaatgcagaaagtgtattggcacaattagggataccaatggctactgctatagatatgtatttaaaacaaatatcattagtaggaggaattcccttttctattgtattaccaaaagcagctaattcagtgaatgcagatatgatgtctgctacacagattcatcaaaagttagaaaaaggatatgccgatatagagaaaggaaatgttgaggatgcagctagtgcgtttgtggcatttagagagaggcattaatgaagcaatataaggtagagattacaaaagaagctttgcaggatatggaagatatatacaattatattgctatagatttgcttgctccggataatgcaatggggcaatataatcgcattgctgatgaaatacttacattagacactttcccggaacgatttaggattatggattctgagccggaaaatagaatggagttgcgtagaatgctcgtcgataattattcagtgttttacacaatccgtgacgaaagggtaattgtaacggatgtgttatacacggcatctgatatagaagcacgtttgagaggcgagctataaaagcacgcgattatttgaatttggaagtgatatagtctacatggctatgcttaatgctattctggttatttatctatcttagaaacagaagatttagttcaaatggacatttcaatttactttacgggcaaaattatttacgatacaaaagagtaacaaattcaagtttgactgattagaaacagggaaaggcgcggcggacaatgtagtgatctgcggcttgtaatttgtggtgggatatagcgaaagaaaaaaggagagatcgcacatggttttattggttgtcgatgtacagaaaggcatcgtggatgaacgcttatatgcgttcgagaagtttgtcagtaatatcaggaagctgattgagaccgctcgagaacatggggtagaagtttgctatattcaacacgatgatgggccgggtactgggttttccatcggggacgatgcgtttgaggtctattctgagtttcaaccgatgcccgctgaaaaacgattcgtcaagaccgtaagcagtgcattcaagaaagagagtggtctgctggagtacctgacagcaaagggcgaaaaagacgtgatggtctgtggcattatgaccgacttctgcatcaatgctacagtagaggccggttttgagcatggactgcacatgatcgttcctgcctatgcaaattccacgctggacaatgagtacatgactggggagcagagctaccattactataatgagtttctctggccaaaacgctatgcggattgcgtatccatggatagggcattggcattactcaaaaaagcgatagaggtatagatatagatatatgttgataaactttaatgatcggcacgctattacagtgtccggcataaataattgccccggcaaggccatctgtgatggagatttagttttgtttactatgaaaaaaacaatctttctgctggtactggtgctaatcatgggaatttgtaccggatgtggtaaagagaatacagaaatcgaaaattcctgcatgaaagaacaaactacatccgaaagcagtgaaaacgatgagattcatttggatgatgaactgaatatagattttacctgcgattattctgaggatattaaggaagatgtagacgatgtagtagcggcttccacatctctgcaggaagagttgacgaatatggagaaggtcacacaaaagtatacgccattagctgaggcggcacaaacgcagggcgaaatgaatgtagccgctcattggctctatacgatatgggatacggaactgaataatctctggagcagattgagtagttcagcggaccggcagacgaaggagaagcttctggcagagcagagaaactggatagatctgaaagaagaagtgactttattaaatattggttccagagaagaaaacggtagtatgtatccgcttttacaggactcttatctggaggaaattacaaaaaacagggcgtatgttcttgcaagagagctggcgaagataaaaggggaagactttgctatgccggaagtttccgcaaagtacggaacctttgtagataatcagggaaccggtgacatatacagttccctgatcaccagacagaattgggaaggaaaagatgaagcggtgatctctgtttacagagagggggaaacagaaggaagctttgtggatcatgggaatggagaactgagctttacatcagaagacggaagtgtaaaaggaatgatcaaaatcgacggatggaatggcgcaagttttaaagttacggaaacatacggagaatctccgttttctgcaggagaagagtttgaatttccttttgccgtttgatttgtgatgatctgtgtcttttcaggctttgagcactccgcgggtgtgtccgcggagtgtcaaagcgtggcaagagacatggaatgaaatggggagcgcggcaggaagaaattcctgcccctttttcaattaccagtctggctatgaacttccaggcacacatcctgctgtccggaactcctctgtgcgtctacagaagcggatgctcggcgcgcgccttaagacgggcgtagcgccggtcaatctccttctggatctcctcggtcacggagcggtactcctccttcagcagatgcctggtgcgtcccatcatacccagccattctgtgacagggattttcttattgctcgaagcaggatcataattcagcactgtgatgccacgttcaatttcgtagagcggaaaataacaacagtctacggcggcagcaatgacgctccgctccagattgggcttatcattccagtttaacggacaggcggacagcgccttgatataggcagtgccaaactctctggaataggcggcggcttttgccgctttccggataaaatcggccggatttgattctgcgaccgtggcgacatagggaatgtgggttgcggccatcagctccggtgtgtccttgtggaagaagttcttgccgtactgtgtctttccgacatgggaagtagaactctttgcgccgagcggtgtggagtaggagagctggtagccggtattcatgtagccgccgttatcgtactcgaaaatgatcagcttatgaccgcgcagggcggtgccgagtgccgatcccataccgatatccatgccgccgtcaccgctcaccatcacaaaggtaatctcgccgtccggatattccccacgcttctggcgctggtgaaacgcctccacaacgccgcttagggtcgccgcgccgttctgaaacagattgtgcagaaatggaacgcggaacgcggttttggggtagccggttgtcactaccatgccgcagccggtctgaaacagcatgacgacatttccctcgatgccctttaacaggaggttcacattgatcggaatgccgcagcccgggcaggcaccgtgtcccggtgcgacgcgcatcggcatggcggtcgtatcttttacggagccgccggagactttcattttcccggttgtgggatcaaaggtgcaggtggtgagacccggcgaggattcttcctttgtgacaggcttaaagtactgcggctgcatcgccggagctgccatcgactggtcagccttgccggaagtgcccgaagcctggtccgctattgtgcggtcagccctgccggaggcacttgaaatcatatcttcgttgatagaggctgccgggtgtgaaaccgccgtcaccgcgtctgtcccggagaaagatgtccctgcggaatctgccgcatccgaagcttccgtgccggcagtaacgccgtagtaatcgaacgccggagcgtctggcgagagcgccgttttaaagagagcgagggcgtcctccacgaaaaagtccttgccgccgagaccgtagatccggcttaagatgcgcggcggatgcggcagggaagagagagcggcctttaattcaagcgacatgttgccgccgccggctccgtagctgtcctgccggtctgcaacaagaatcgtggatgcattgtggcagaggacgcggagttccttagcggggaacgggcgcagaacgtatagggtgatcacgcctgccgctacgccgtcttttcgcagacggtcaaccgcttccatggcggtgtggtaggaggaaccgagcacaaagagcagcacctcggcgtcctcgtgccggtaggcaccgcagagggaaagttccctgccggagagggcagcatattccgtaaacagctccggcagcttgtttctcgcggcttccatggcgagatggagctggtagcggttattgatgacatccggctcgttcatataggaaccgatggaaaccggatgcgcgagatctaagacgctggcgtagggaagctctccggcggcgccgcaggtgccggtgccggcaaatgcggagaccttcgggttgtcacacgaaagcttttccccgatatagcgggtgacggtgtcatcattctcaaatacaaggcacttgcgcttctgatggctcgtaaaaaagccgtcgaacgcgactgcgaccgggagacggacagcctcggcaagctttagaccgagcaggttaaaatcatagactttctgcggttcatcggcaaaaagaatgatccagcctgtgttgagcagatacatgacgtcgctgtgatcgcctttgatgcacaaagggccggaaaccgtgcggcatgcaacattcatgaccatcggcatgcgtgtgccggactgcaccggaaactgttctaaggcgtacaaaagcccgttggcgctggtggcattaaatacacggcctccagcggctgaggcgccgtagcagatgccggcggcgctgtgttctccctcggcggcgatcagggcaatgtcgtgaagcccctccgcgcccatgacatccagattttccgcaatctgtgtagagggcgtgatcggataataccccatgacgtgatagttgatctgctttgcggcaaatgcagcaagctcattgccgctgtcatacataattttttgtttttccatatcattctccattctgcagacgctatgcgccggtacgattcactggtgctgcctgcatttatacgacgcctccgtcgacccgcttttcgtcggtaaaagaatcgcttgtgatccaggaattcgcaccgacggtctgatagcggatggcgtcgggcagcagatgctgattcggaagaaaatgcggtttttccgggtaatctttttcgagtgccggcacgagtgcactggtggggcagacttccacacagcgcaggcagcccttgcagtgatagtagtcaagcccccggttgaccatgcagtttttttcgcggtaggtgccgggagcaaactggaagaccatatccgggcatgccgtgtcacacagtccgcagttgatacatttttcctgaataaaaaggggaatgtacccttcgcgcgaggcggtcagatcgttggagacggtgcttccgatccgcggattgacgccgccgatcggagcgttggcatagccccaagcataccgttccgccggggcgtccggcagaggggcgaggttgcggtcaccctgagccattttgacattttcatatcccaggcgcagacccgcgagattggcttcgatgagtgcgggatattttttcccgatcgtatcgcggcagagcgtttcggcagcttccggcgggataaatccgctggcgcgcaccagagcaccgagcatgaccatgttgatgcgggaatgactttccatcgcaagtgcgagcgcatccagacaatagagttctccgatggaaatgtggtacttatctgccgcctcttcagcggacaagggggtatttaatacgattttggtgtctacggtgacgccctccaagaccgggtaggtgccgatcagccccctgtgaaagatgccaagcagatgcggccgggtcacggggctgttgacgcgcagcgggcggtcatcggcgcaccagcggacatacgccttgaccggtgaaccgcgcttttcggagccgtagctggaaaagcttaaggaattgagcgaaagcgacagtgcgccgagctccccgagcatttttccgcagagattggcgcccagcccgccgatgctctccaggcggatctcataggagccgttttcatttgtgacaggtaaggataatgtatttttcacgtaaatctccattcctgcgcgggcagccgtgcatgggaaaatgacaggcgccggctgtgcgcatacagcgataacaggctatcttgtggtagtatgccgcattttcagaaaaaaatcctatgcaagtgcaaaaaagagaagtaaaataggaaaggaatttttacaatgaaacaggaaagatgatggacaacatgttgcagaagatcatagattttataaaaaaggaaacggtactcacgatcgccacagttcttgccgtggcctcggcattctgggtgcacccgggtccgcagtacgtgggctacattgactggcgcgtgctcggcattttgctgtcgctgatgctgattgtggcaggatttcagagcaatggactgttcgatgcgatcggcagccggcttctggcaaagacccaaaataccgcgcagctgatgctggtgcttgtttctctctgctttttttccagtatgtttatcacaaacgacgtcgcacttctgacgtttgtgccgtttgcgtgcacgatcctgcagaaatgccaccaggagcggctgattgtgacagtgtttgtgttgcagacgcttgcagcaaatctggggagcatgctgacgccggtcgggaatccgcagaatctgtatctttacagcatctccggtgccgggctgggagaatttgtcggatggatggcgccgtatacgctcgtgtcgggtgtgcttctgctgcttgtcgtgttcgtgctcagcgcgggaaaatgccggatctcgctggagaccggttcgcttttgcaggtgtccagcgcatccggcaggaagaaaaacgggatttatctggcgctctttgcattaagcctgttttcggtagcgcgggtgcttccgtgggagctgatgctcgccgtggtgctcattgtgctcatttttacggatcgtgcggtgtttttgcaggtggattactgtctgctgtttacgtttatcagtttcttcatcttcatcggcaatatggggaatatcgaggcggtacggtctgtcctgcaaagtcttgtggcgggcagggaactggcggttggcatcggggcgagccagatcatcagcaatgttcctgcagctctgcttctggcggattttacgcacgatctgaaaaatcttgcgatcggcgtgaatctgggcggactgggaacgctcatcgcgtcgatggcgagcctgatctcttataagatctacgcgcacaattataataagacgaaagggcactacctcctgtggtttacgatcgcaaacgtactgtttctggcagtacttgtgctggtctatgttttcatttcataggaagcggcggatgcacggatgggagaatacggcagaagcgcggatggagaatacgacagaaacccggatgggagaaatggatatgagtgatagaaaaatgaatgtggaaagcctgaggggaacagtctgcgtgctgctatcggcagtctgtttcagcaccggaggcgttttaatcaaatcgatcccgtggtcgtcggtgacgatccagggagcgcgcagtatcttctcggcgctggttgtgggatgttacatgcttctgcgccgccagaagttcgtgtggaataagacggtgttcttcggcgcggtgtgcaatacggtgatggcgtttgcctttgtggcggcgaccaagctcacgacagccgccaacgcgattgtgctgcagttcacggagccggtgtttgtcattcttctgatgtggctgatctttcacaaaaagccggggcgggatgcggtgtttgcctgcgcgggagtctttgccgggattttctgcttcttttatacgtcgctggatgccggagccatggcggggaatctgctcgcgattctctcaggtcttgcctatgcgcttgtgatgatgcagaaaaaattccgcggagcggactttgaatcgtcgcttctggtgtcctgtgcgctgagcgcggcgatcggaatcccgttttacgggcaggagagcgaaatgtcactgcatatctggttcttcgtgctgctgctcggcgtggtacagttcggtctgtcctatgtgttcctgtcgcggggactggatgcggtctctccggtcacggcgtcgctgacctcgacgatcgagcccatcttaaatccgattctggtggctgtcttttatggggagacaatcggtgcaactgctgtcatcggcgccctgctggtggtcggttcggcgacggtctacaatgtaaggcaggcaaaaaacgctgcctgaatccgtacaaaaaggctggaagaagtcatacaaaaggtacaaaaaagacaaaaatatatgagcagccggtaaaatatttgttaaaaaaggaaattgctgaacaaaaagtgtcatgctataataacttctaaattcaaatatcagatgacatgtgcaagggagcaccgcggtagcggctgctctctttttttatgtaataggaaacttcgttcctattacataaaaaagctccccggggatcgcactgcggcggagacgaaagatgtcgcaagagcgacccgccgcaggcggagaatcctgcaggcaggattcttatttattccataggaaataccagattgcactaagatgtgaaagccgggctgccgcagataaaaaaccaccgcgcaattatatggtgagcggcagacacagacaaaaaaggacgattttttgaggaggagaagaatgcagacggaagagattttaagtgccggaattgatattggaacgtcgacgacgcagcttgtgttcagcaggatgattctccagaacacaggcggatttggcagaattccacagatcaaggtggtgtccaaggaggtcatctacgagagtgaaatatattttacaccgctgtcatcccgggaggagattgacggggagcgcgtgcatgagatcataaaaaaggaatatgagaaggcgggtgtttgtccggcagatcttgcaaccggagccgtcatcatcacgggggagacttcacggaaaagaaatgccgagtcggtagtgcgggcgatcgccgatgtggcgggagagttcgtcgtggcgacagcgggagcggatctggagtctgttctggcaggaaaaggtgcgggagccgcggatttgtcccaaaagacggggaagcgggtagtcaatctggatatcggcggcggcacgacaaatatctgcgtttttgagaacggaaatatggttgatacggcatgtctcgacatcggcggcagactgatccgcgtgaaggatggcagggtgatctacatggcgcccaagctgcaatggctgtgcgacaggcttgagattgatcttgcggagggcgggacggcagaaccggaaaagctgcgcagactcaccgctgcgatggcggaacttcttgcggaggcagtgcatctggcgccggaggcagcagagctttcctacatgcagaccaaccatcttctggcggatagcacgccgcccgatattgtgatgttctccggcggggtggcggcatgcttcggggaagaggagaatctgttccgctacggggacatcggaatccttttggcgcaggcgatccggaagaacgaagcgtttcgccgggcggcagtgacggatgcgcgggaaaccatgcgggcgacggtgatcggcgcgggcaactacagcatgaacatttccggaagtacgattgagtacacgacgaaaccgtttccgttaaaaaatattccggtggtgaagcttccgctggagcgtgaggaagagattgaaaaactgccggaaaacatgcaccgggcgctgctgctttataaggaggagcaggaaaaagaccggcaggtggcgcttgccatgaaggggttaaagtgccctactttcgcacaggtacaaagaattgcagaactgattgcgggtcagtatgtcagggagtgcggcatgggcaggcatctgatcctggtgcttgaggaagatatcggaaaagcaatcgggcaggcgctgcatcacagactgaaagagaagtgcagtgttatctgcatcgatggaatcagctgtgggagtggagattttattgatctgggtgaaccggttgcgtcgggtaacgttatccccgtgatagtaaagacattgatatttaatggttaggagcagcttatgatattaaagacacggatgctggggcagacctatgaatttaaggatgtaaaagatgtgctggcaaaggcgagcgagaaaaaatcgggagacgagctggcaggtgtgggagcggagagcgccttagagcggattgccgccaaggaggtgctggcacagctgaccgtggcggatttaacagagcatcccgtggtgccctacgaggaggacgcggtgacgcggatcattcaggatgatatcgatgaaacggtctacggcacgatcagggatagaacgatccaggagatgcgggagtggattctctgtgacgccacagacagcggggcgctgatgcgcgcaagccggggaatgaccagcgaagtgattgccgcgatctccaagatcatgagcaatatggatctgattcttgccggaagcaagatccgggtgacggcgacctgcaataccacgatcggaacggaaaacgtgctcgcgtcgagactgcagcccaatcatccggtggatgatgtggaaggcgtggcagccagcaccttagaaggactcagctacggcatcggcgacgctgtcatcgggctgaatccggcgattgatacggtggacagcacgcttgcaatctggaaagtgctcggggatatccgggataaatatgagattccgacacagacttgtgtgctctcacatgtgacgacacagatggaggcgcttagaaccgggcagggaagcgccgatctgtgtttccagtcgattgcgggatcggaggcggcgctctcggcgtttggcatcaacaccgggatgctgtcggaggcggagatgctgtttcgggaggagggaccggcaaagggacccaacgtcatgtattttgagaccggacagggttcggaactgtcgtcctcggcggcgttcggcagcgatcagcagacgatggaatgcagatgttacggtctggcacggcactatcatccgtttctggtgaacacggtggtaggtttcatggggccggagtatatctacgacaccaagcagctcacaagggcggcgctcgaggacgtattctgcgggcatctgcacggactgccgatgggctgcgacgtatgttatacgaaccacatgccgaccgatcagaacgactcggagacgatcctgacacttctgggaacggcgggcgttcactatgtgatgggactgccgcaggcggatgatattatgctgatgtatcagtccaccagctatcacgatgtggcgagtatccggcagctgctgaaaaaggagccgataccggagtttaaggcatggcttgaaaaacggggcatctgggaaaacgggcatctcggcccgaacgccggagatccgtccatattctttaaataggaggaacgggatttatgagtgaaaaagagaccgcctgcctccgcgatattacagagacagacattatggaatatatgcaggtggagcacccgcacaatgaaaaggaactctggaagatgaagcatgcgacgcccgcgcggatcgggatcggacggtgcggcgcacgctacacgaccgaggcgcagctccggtttctggcggcacatgcggcggcaaacgacgcggtgttcaatgaagtgccggaggaagtggtaaaggagcttggcgtttttgaggtgcggacaagatgcgccaataaaaacgaaatgctcctccgcccggactggggcagggagtttttgccggatgccagacaaaaaattgcggaaaactgcgtccatcatccgcaggtacagatctatttcggcgacggtctgtgctcgccgtccatcaaggcgaacattccggatctgtttccaaccataaaaatgggtctggaggataagggaattaccgtcgggacaccgtttttcgtgcggtattgcagagtgaataccgcgcggacgatcggaccgcttctggatgcggaggtaacctgcgtgctcatcggggagcgcccgggtcttctgacatcggagagcatgtcggcatatattgcctaccatgcgagaccggacatgcttgagtcggagtatacggttgtatcgaatatcagcaggcacggtgtgccgccggtggaggcggccgcacatattgcggatctgatcgcacagatcctggaaaagaaaaaaagcggcgtagaattttcaaaagcagaataaagacatggttgcgaaggagcacaggcgggacgtctgtgctctttttctatagaagcagcaagacagacaaaggaggatacattatggagaaaaacgaaggaggtcagctggtgcgtgctctcggactgaaagagtcgatcagtatgacgataggaacggtagtaggagtgggactgtttacctgtggttcctcacagattggatatgtcggatcggggattattgtaattacatttttatccctgctcatttcgatctggccctgtctgatctacggcgagatgtcagcggcacttccgtgtgccggaggtacttacaattatgcgaagcgcggactcaaccgggtctgggcgaatctggcaggctggcattacatcatctccgtggtcggcatcggcgcgggcgagacactggcattttccaattattttaaaattctgttcggagaactcggcatcaatatcgagggagtggattctcggatcattgcgattgtgctggttctgtttttcctgatcttgaactttcggggaattgagatgtctggaaaagcgcagacgggattcattttcttcttctggggctgtgccgtggcatggttcttatatatgataccgcacattcacctggactatttcggcgggatcgccatggattccctgccgtcgtttaaggaaatgatgtacattttcggactggtatggtggtgctataccggatttgagacctgtgtatcgatgggtgcggagacgaaatatccgcagtatacgcttccgagagcgttaaaagtatcggtattccttgtatttgcagtcaacgcgttattccagtggtttcttgtcggactggtgccgcacgagttttaccacatccttgcagtggcagacgcaccgtatgcggagggactccgggctgccggactggtgggcttcccgatcattctgctctgcatcggcattgcattcggcggcgatctctccaccatcaatccgggaattgcggcaccggcgcgctacatctacacgatggcggaggacggttccctgccgaagttcttgtgcaaggtacatccgaagtataagacaccgtatatggcggttcttgtggtcggcatcatcaatattatcctgattgcaacagggtcaatcaattatatcgcgtcggtatcgctgatctcactcgcagtatgttatatgattggctgtctggcttaccttggcttaaagaaacactatccggatatgaaacggccgtacagggcgccggcaggaacggtcggatgctatgtcacgattgcagcctacactattattctgattttcgcagaccgcatagcgcttctgacggcggcggttgtgactgtggcagcgattgtctactgggcgcttttcaccagaaagcatgagaataagattccgtccattgaggaggagatcggtatcctcgaggagccgtccccccaggaaaaggcaaagatggacaaggagtaccggatctggaaagccggcacgatccttgtgacggtgatagcacttggcatttacattattccagtcttattttaaaatttaagggattggaaaggagcacggtatgagactttatgagggtaacattttaacctgtgacaaagagaaccggattgcacattatctgttggaggatcaggggaaaatcctttactgcggggacgagctgccggccggctgtgtggcggcggagcgcgtgtccaccggggagggggcattgattccgccgtttgtggacagtcatatccatttcgcaagttacgcgacgtttcatgccgggctcaatgtcatgaatgcgcggagcaatgaggagattcttcagatgctccgggagcatgtgaagaaaacgaaggaaaagctggtgatcgggtttggcgcatcgccgtattccgtgtcagacggacatctggtgcgcagggtgcagctggatgaggtgtgtcccgacaaaccgctctttctggtaaagtatgacggtcacgcgtgtgtcgtcaacacggtgctgttaaacgaagtgcgcggcaaggtgcagcatctgcgcggttttcatgaggataccggggagatgaaccaggaggcatttttcgccgtctcggattatatcacagcttcgctctctacggtgcagctggtggcgcacatgcagaaggcgctggacgatctggctgcgcgcggcatcggcatgatccatacggtcagcggcgtcggctttgcgagagatctggacgtcgatctggagcgtttttttgcgcgcggcatcacaaacggcatgcagatgcgcgtgtttatgcagacgctcgatgtgaataaggcggtaaagcggaagcttccgagaatcgggggctgttttgagacagcgcttgacggatgcttcggttccatggatgcggcactgctctcgccgtatgaaaacacgtcggactgcggcgtactctactattcggatgaaaaagtgacggaattctgtaaggcggcaaaccgcgccggtctgcagatcgagatgcacgcgatcggcgataaggcgtttgtgcaggcggtgcgtgccatcaaggcggcgcttgacgatctgcccagagaagatcacagacatacgatcatccatgcatgtctgccgactgcggaggagattgcggtctgtgagcggtatcacatcaatctggcagtgcagacggcgttcattgactggccgcaggagccggactgctatctggagcagatcctcggagagcgtgcgggcaggctgaatccgatccgcacattctgcgaacacggactgattttaagtgcgggatcggacggaccctgcacagatccggacccgcttttatggatgtataaggcatgcaatcacagcaatccggcagaatccatctccgtgcagcaggcgctgcgcatgtgtacctacaacggatattacacgacctttgatgagagggagcgcggaagtctggaagcgggaaaaatagcggacatggtgttgctggaccgcaatccttacgacatcccgaaggaggaactggcttccgtcaaagtgaagcagctctacctgcgggggcaggaatataaaaaaggaaacggcggcggagccgcacagattctgcgcggaatgataaagcggggaaaatgctgaccggcatttttctcagttagggtgatcttacagatattttacatatcccttctaaattttacacaacgcacccgaacaattttacaaacctccgatatgatagaagaaataagaagctatcatatcggaggtttttgaatacatggaaaaacagacattggtatgggcgcaccgcggcgcaagcggctacgcgcctgaaaatacactggaggcattccggatggcggttgagatgggcgcggacggcgtggagctggatgtgcagctcacaaaggatggagaactggttgtcatccacgacgagacggttgaccgtaccagcgacggcagcggctgggtcaaagattttacatacgcgagaatttccagatttaattacaacaggacgcataaggaagggtacgagcgggcgatgatcccgacgctcgaggaagtctatgagctgttaaagccgacgggacttacgatcaatgtggaattgaagaccggcgtggtcttttatccggagatcgaagagcgcgtgcttgacctgaccgcccgcatgggactggaggagtgcgtgtggtactcgtcgtttaaccactacacggtgcagcgcatcaaggagctgaatccgcaggcgaagaccggcatgctctattgtgacggcattgtcaatccggtcagctatggcgcgcttgtcgtgggcgcagacgccatgcatccggcgctctacaatctgcagtatccgaattacatggaagactgtaagaagcacggaaagcgcgtacacgtctggacggtgaacgaggagcagtacatgcgcatggtgtgcgagatgcaggtggacgccatgattacgaattatccggacgtgggcaggcggatcgctgccgagtatctggacggaacgctgacaccggagctggtgcgcgtgataaagaagcaggggaagcagggatgatgccggaggatagaagctgtgcgaaagaggagaagactgcttatgccgcctggatggcggagacggtagagccttatctgaaagagcacggcgagaagggctatcttaagatggaagatggcatgtcgatcgcttaccggcgctattttctgccggatgcggggaaatgtgttgtgatttcccacgggttttgcgaattcgcggaaaaatataacgaagtcgcataccgttttctgcaggcgggatactcggtctatgtgccggaacaccggggacacgggtattccgggcgcgaggtggatgacccggaactggtgcatgtgcaaagttatgactgctatgccgcagatctcgcgcggtttgtggagacggtcgtaagtcccggggcggaacaccggatcgtgtttgcacattcgatgggaggcgccattgcaatccttgcactggaacgttatccgcagttgtttgaggcggcagtcctctccgcgccgatgtgtgccatgcagaccggaaaatatccgcggtttctggcaaaactgctggcggagttctgctgtctgaccggaaaaggaaaatgctttgccacactggcgggacagcagggcttttcagagacgccgcagtttgaggggagcagctgcctttcaaaagagcgttatgactatatgtttcaaaagcggctcttagatgaacattaccgcacctacggcggaagttatgcctgggtccgcgcagggcttcgcgccagccgtaagctgatgcggcgggagaatctggcaaagatcaaggtgccggtgctgctttttgcagcaggtcgtgaccacatggtggataacgatgcgatcgcgcggtttgcggaggagacggagcggacaaagcttttctttatgccggattccagacatgagatttttaatgcggatgagcggacgcgtgcgaaatattatgatgaaatattccgctttattaaggaagaagaggtaaaagattatgaaaacgaaaatgagcagactcgaaaaattctgggtactgtatgacgtcggaaattcggcgttcacactgctgatgtcgacgattataccgatctactacaaaaacatggcgtccgcaaacggcatcagcgcatcggactccaccgcatatctaagctacgccatctcgatctccacgctgattgtggcggttttaggaccggtgcttggtgcggtcgccgacaataagaaccgcaagaagccgctgtttacatttttcatgatgatgggagtgctcggctgtgcggcgcttgcgattccaaggacctggattctgttccttgccattttcgtaattgcaaaagtcggattctccggaagcctcattttctacgattccatgcttgtggatgtcacgacggatgagcggatggatgaggtgtcctcccagggctatgcgtggggatacatcggaagctgcgtgccgtttgtggcgagcctcggtctgatcctcggcgcggacgcaatcggcatttccggcacggttgcgatgatgattgcattttttatcaacgcggcatggtgggtggttgtgacactcccgctgctgcggaactatcagcagaaatactatgtagaagcgggcggcaccgatgtgcgcgggatcttttccagactcggcaaagtctttgcggagatccgggatgacaaaaaggtgctgtggtttctggcagcgtttttcttctatattgatggcgtgtataccatcatcgagatggcgacttcctacggaaaagacgtcggaatcagcgacaccagccttctgatggcattgctgctcacgcaggtcgtcgcattcccgtgcgcgattctgttcggaaaactgacccagcgctttgcagcttcaaaactcatttcggtctgcatcggtgcctactttgtggttgcggtctatgcactctggctggatgcggcgtggaaattctggatgatggcaacgtttgtcggcgtatttcagggagccatccaggcgctctcccgttcctactatgccaagatcatcccgaaggaaaagtcgacggagtatttcggcatcttcgatatttttggaaaaggagcttcctttatgggaacaatgctgatgggaatcaccacgcagctgtttgatacatcaagagccggtgtggcagcgatcgccgctatgtttgttgtgggatttatctgctttcagatgcagcgccggtgcatggagggggagacgtcacagagcggtgcgatgggaggcgcagcgggttttgccaaagaatgattctaaaaagaaaaagaagcgaatagaaataaaggaaaaacaaaacggagaacaaaaattgccgaatgaggacctgttgagtgagaaactgttacagccgatggtgcagctatcctatgccgctgccatggatctcgtacaggcacgattaagactgatcaatgctgacctgacggaacaatgccaccgccaggtcattcgcaatatgtcctgccgcatcaagacgccggacagcgtcaccaaaaaactcaaaaagaaagggcgggaagtctcttttgaggaggcggtgcagactctcaatgacatcgccggcatccgggtcgtgtgctttttctgtgacgacatctaccggattgcggatgccatcaagaagcagaaggattttcatattatcaaggaaaaggattatgtgaaaaatcccaagaagagcggctatcagagtattcatgtgattgcgggcgttccggtgacgtacaacgacacggtcacggagatccgggtagagatccagatccgctcgtttgcaatggattactgggcggagctggacacacagatgtgttataagaaggatgccggacagatcgccaatgtggagcgcgagacgcgcggctactcggatgtgatcgcaaaggtggacaataagatgttagagctgcgccagcagatcgaaatgatgtgacaggatttttacacaggttttacataagtgctcttctgcattttacattcctcccgtaaagtaaaccatgttctaagaaacgaggtaaaagaaaaaacggagaagaaattccgtaaaattgaatggaggattcaaaatgaagaagaaagtaatgtgtatgttattgacaggtgttatggcagcgggcatgttcgcaggatgcggcagcagtgatacagcagacaccaccacagatgcagcagcaaccacagatgcagcatccaccgcagacgcagcagataccacaagcgaagctgcaccggcagagaatgcagatttcgagcatacatcagcaatcgccgtatattcccgtgaggatggttccggcacaagaggagcattcatcgagctgttcggtgtggaagaaaaagatgagagcggcgagaaagtggataacaccacagaggaagcgatcatcaccaacagcacggacgttatgctcacatcggtagcaggtgacacctacgcaatcggttatgtatcccttggttccttaaacgacacggtaaaggcagtaaaaatcgacggggcagaggctaccgtagagaacatcaagagcggtacctacaagatcgcaagaccgttcaacattgcaacaaagggcgaggtcagcgaggctgcacaggatttcatcaactacatcatgagcggtgacgggcagaaagtaatctccgacaacggttatatcggagatgattccgcagcagcattcgagtccaacggagcagaaggcaaagtcgtagttggcggttcctcttccgtatctccggtaatggagaaactgatcgaggcttacaaggcagtcaatgcaaatgtggagatcgagcttcagacaagtgattctaccacaggtatgaccggcgcagcagacggcacacttgacatcggtatggcttcccgcgagttaaaggattccgagacagaagaaggacttaccgcaacgaagatcgccatggacggtatcgcagtgatcgtaaaccaggagaacccggtagaggatctctcctccgacactgtaaagggtattttcacgggcgggacaacaacctgggatgcagcaaactaggacggacagctgaaaatagcatagcaggacggaccgggggaacagaatgttcttccggtcctttcgtggaacatacacgttatttaggaaaacctgtaaatggaggctctgatgaaaaaaagagagaagatcatggaatatgtatttctgctggctgcggtcatctccatcgtggcggtggcgctgatctgcatattcctgtttgcaaacggaattccggcaatgaagaaaatcggatttgcggaatttctgaccggaaccaagtggaagccgggaaacaataaattcggtattttcccgatgatactgggaagtatctatgtcaccggaggcgcgctgatcatcggtgtgccggtcggtgtactcacatctatttttatggcaagattctgtccggaaggactgtacaagctcttaaagccggtcgtgaacctgctggcgggcattccgtctatcgtatacggatttttcggactggttgtgctcgtaccgttcatccgggagcattttaagaacagcaacggacagagtattctctgtgcgtcgattcttctgggaatcatgatcctgccgaccatcatcggagcgtccgaaccgacgatccgcgcagtggagcagagttattacgaaggagcgctggcgctcggggcaacgcatgagagaagtgtctttactgtcgtggtaccggcggcaaaatccggtattctggcggcggtcatcctcggcgtcggacgtgcactcggggagacgatggcggtcatgatggttgtgggcaaccaaccgcgtgtcccgaacagtattctgcagggcgtccgcacactgacgacgaacattgtcatggagatgggctatgcgacggatctgcaccgggaggcgctgatcgctactggcgtggtgctgttcgcgtttattctgatcatcaatctgtgcttctcggcaatcaagcgaagcggaaaggagtaggggatggaacagataaatccaatcaacaaagtaacattaaaagataaaatgaaatcctataccagacatcccggctctttgatcctgctgcttctggttttgattgcagccgcgctcacggtggtgacgctgctttttcttgtgggctacatccttatcagtggtattccgtacctaaagccgagcctgtttgcattacattataattcagacaatgtgtccatgctccccgccatcatcaacacggtggagatggttgtggtctcgctgctgttttccgtgccatttggtgtgggggcggcaatctacatgatcgaatatgccagaaagggcaataaattcgtggaggttgtccgtctgacagcggagacgctgaccggtattccttccattatctatggtctgttcggtatgctgtttttcaacattgcactgcactggcgctattccatgctctccggagcggcgacgctcgccatcatggtgctgccgacgatcatgagaaccacggaggaggcgcttttgtgtgtgccggattcctacagagagggaagcttcgggctgggcgccggaaaactgcggacgatttttaagattgtgcttccggcggcaatcccgggaattctatccggtatcattctctcgatcggacgtatcgtcggagagaccgcggcgctcatttacacggcgggtaccgtgaccggtgtggcgggacttatggattccgggcgtacgctcgccatccatatgtatgtgctttctaatgaaggtttacataaaaatgaagcaaatgcgactgcagtggtgctgcttgtcattgtccttctgataaatggagtctcatccctgatcgcgaagcggtttgaggcagtgaaagaatagcgcgaagcgcggaaatgaggaaaacatgggagaaaagtttaatatatcgaatctgaatctgtattacggcgatttccacgcgctcaaggacgtgggtctgtccattaatgaaaaagaaattaccgcatttatcggtccgtccggctgtggaaaatccacctttttaaaatgcctaaaccgcatgaacgacctggtacagggatgtaagatcacaggacaggtgctgctcgacggggaagacatctacagcggcatggatgtgaacctgctgcgcaagcgtgtcggcatggtattccagaagccgaatccgttcccgatgagcatttacgacaatatcgcatacggaccgcgcacgcacggcatccgttccaaggcaaagctggatgagatcgttgaaaaatccctgcgcgatgcggcgatctgggatgaggtgaaagaccggctgaaaaagagtgcgctcggaatgtccggcggacagcagcagcgtctgtgcattgcacgtgcgctggcggtcgatccggaagtgattctgatggatgaaccgacgtctgcgcttgacccgatctcgacctcgaagatcgaggaccttgcggtggaactgaagaaaaaatacacgatcatcatggtgacgcacaacatgcagcaggcggtgcgtgtgtccgataagaccgtattcttcctgctcggcgaggtcattgagagcggagatacggaaaaattgttctccgtgccgcaggataagcggacagaggattacattaccggacgtttcggttgatgaaaggagcaagcaatgagaaacagatttgagagacagctgttagaactgaacaatgaactgatccagatggggagcatgattgagcacgcgattgagatggggatctccgcgctggtgcgccaggatgtggagaaggcgaagaaggcgatcgcctacgatgaggaaattgacgagcaggaaaagaccgtggagtcgctctgcatgaagctgctgttgcagcagcagccggttgcaaaggatctgcgcctgatctccgcggcgttaaagatgattaccgatatggagcggatcggagaccatgcggcggatatttccgagatgacgattctgatgtccgatgcgacatacgagcgcagcgcgatcaacattgatctggtggagagcatggcgaaagagaccaccgatatggttatcaaatgtgtggatgcgttcgtcaacaaggatctggagctggcgcgcacggtgattgcgcaggatgacgtggtcgatgatctgttcgcggactttaagcagcagctgatcaaaaagatcaatgagaacgtcaaaaacggcgagcaggcgacggatatgctgatggtggcaaaatattttgagcgtatcggcgatcacgcgacaaatattgccgagtgggtcatctattcgatcacgggagagcacgagaagtagaaaatcggtctaaaaaccgtgattttacacagattttacataaagcttaccggaaaattacctgaaattaaaaaattttaccgactccttggattgtaattgcaaaacgtcaaaaaatacgttataaatgattatgtatgcgtatgtaaaaaagatgtaaagcaatgagatgcaaaggagattagaatggatatttttggagtactgtccctgattggcgggttggcattattcttatacggaatgcacgtgatgggtgcaggactggagaagatgtcaggcggaaggctggagcgcatcctggagaatctgacatcgaatccgttaaaagcggtactgcttggtgcaggcgtcacagcggtcatacagtcatcttccgcgacgacggttatggttgtcggatttgtaaattccggtattatgaagctttcacaggcgatcggaatcatcatgggtgccaatatcggtacgacaattaccgcatggctgctcagcttgacgggaattcagggagacaacctttttataaatatgttaaagccgacatcgttttcaccgattctggctttgatcggtattattctgctgatgtccggcaagagcgataagaagaagattaccggagagattctgctcgggttcgtcgtgctgatgtacggtatgtcggcgatgagcggtgcggtggagccgcttgcggacgtgccggagtttacgaacctgcttaccatgttcaagaatccggtgcttggagtgcttgcaggagcgctgcttacggcgatcatccagagttcttctgcgtctgtcggtattttacaggcgctttcggtaaccggcggatttacgttcggcacagcgattccgattattctgggacagaacatcggtacctgtgtgacggcgatgatctccgcaatcggcgcgaacaagggtgcaaagcgtaccgcgtttgtacatttatattttaacatgatcggtacggttcttttcctgtgcctgttttatctggggaatgcaatctttcgtttcccgtttacgaacgatgtcgtaaatgcagcggatattgcactggttcacagtatttttaatgtatttaccactctggttctgcttccgtttacgaaaggactggagaagctggcatatcttacgattccgaagacagaggatgagaagaagacagcaaacgatgcgtttgtaatcttggacgacagattcctctcgtccccggcatttgcgattgagcagtgccgttcactggtaagccagatggcggagatgacaagagatggattcctggaggcgatggacgtgctgggcgagtattcggaggagaaagcacaggatgtcattgacaaggagaaccgggtcgatgtctatgacgacaagatcaccgcatatctgacgaagctgagcagtgagaatctgtcctacaaggacagcctgcaggtgacgtcgctgttgcactgtattacggattttgagcgtatctccgaccactcgatcaatgtggtggagagcgtacagcagatgcgcaaggaaaatctgacgttttccaggaagggcgaagaggagatgaatctctacggtgcggcaatccgtgacattctgacaagaaccacggatgcgtttgtgaacaacgatcaggcactggcgcatacggtggagccgttagaggaagtaattgacgaattaaataaagatgtgaagaagcatcacatgaagcggctgcgcaagggcaagtgcagtatggagctgggactgatcctgtcggatcttgccatgaattatgagcgtgtggcagaccactgttccaatattgccgtgtacatgatgcagctgaaggatacacagctggaggagcacagctttacagagcagctggatgaggcggagagcgcagagttcaccagactgctggatgagttcggaagcaggtactctctgtaattcgtatcttcgatctgatgtgcacaggaagctgtggaagagaggagaacaatggcaaccatttatattgtggaagatgacgtcaacatccgtgagattgagcgttatgcgctgaagaacagcggatatgaagtggaggaatttgagagcggagaaagcctgtttaaacggctggagcgcgcggttccgtcccttctgctgctggacattatgcttccagatgaagacggtctggagattctgggaaaactccgggcaaataaaaatacggcagccattccggtcattatggtcaccgcaaagaccagtgagctggacaaggtcaagggactggatctcggagcggatgactatatcacgaagccgtttggcgtgatggaactgatttccagagtaaaagcgctgctgcgcaggacgcagagtgcggcggagaagacaaagatctgccacggcgagatccggatggataacgacaagcatgcggtatttgtcggagatgagccgtgtgagctgacgttcaaggaatacgaattgttgaaatatctcatgatcaatgcggggattgtcctgtccagagacaagatcatggatcaggtatggggctttgagtacgagggcgagagccggaccgtggatatgcacatcaagacattgcgccagaagcttggggcggcgggaagctgtatcaagacgatccgtaatgtgggatatatgatcgagtagacaaaaacctatgaagaaaaaattaaattccaaatttatgttgattgcggcaatcgccattctggtgactgccgtatgttctatcgggctgttttacagcattctggtacaacagatttatgatgacttaaaggcaaatgcacatgtgatctcccggctggatttcgaggatgcgtcgcaggaagtgtgcgatcagctctccggggacgggctgcggatcaccctgattgcttcggagggaaccgtgctttacgacagcatggaggacgagacgaagatggagaatcacagagggcgcccggaggtcgagcgggcgcttgcagtcggggaaggccgcgggatgcgcaaatcgacgacttccgcggagcacacattctattatgcgatgcgcctctcagacggaaatgttcttagaatcggaaaagagagcggcagcatctatcatctggcatggaatatgacgatgcttacgctgggtgtgggattgtgtgtattcctggtgtgtgccttttttgcaaaacgcatgacaaagcgctttgtggagccaatcgaaaagatggcggacaacattgtgcttgtcgatgagcgggaagtatacgaggagatgcgtccgtttgtatcgatgatcaagcagcagcatgtggatatcttaaaccatgcacagatgcggcaggaatttaccgcgaacgtatcgcatgaactcaagaccccactcacggcgatctccggctacgcggaactgatcgcaagcggcatgaccaacgagcgcgataccgagcattttgcaaatgagattcaccggagtgcggaacgtctgcaatctttgattaacgacatcatcaagctctcggagctggacaacagcgaccttaggctggagtttgagccgatcgatctctatgcgctggcgacgacctgcatcgatcagatgcagatagcggcgcagaagaacgaagtcacattgctgcaggaaggcgggtcggtcacgatcaacggcaacaagacactcatcgaggaactgctctacaatctgtgcagcaatgccgtgcgctataataagaagggcggcagtgtgaccgtcattacgggcaagaagaaccagagaccggcgctcacagtgcgcgataccggcatcggcatcccgaaggagcagcaggaccgtgtctttgagcggttctaccgtgttgacaagagccgttccaagtccacgggaggcacaggactcgggcttgcgatcgtaaagcacatcgtcgtgcagcacgaagcccagatcgaactctccagcgaggagggcgcgggcaccgaggtgacggtaatcttctagcccgcgcgacgcggcagaaaccggggcgctttggtatattatgacggcggccggagaaatccgccggattctgccgattgccgggagtcgcgattcgatcgcaaaaccggcggtttctaaccatgctgttctcacatctgcgatcgtccgtgtctttccaagctttgaacacgctatggagagtgttcgcacagcaaaagacaattttaaaatttttgtgcagcgcttggcacaccggtgagcaaaatataagaaattgtcgcaataagcaaagatctctttgaagtgataagtaatattacgagaaatagatacttaaaagttccagataaacatgcggcggcaaattctgaccgcaaaatccggtatttctaaccatgccgcagctggcatccgtgatgatccgtgtctttccaagtttggagcactccacggactgtgtccgcaagccggcagacaattttaggacttttgtgtgtgtccctttatggcacctctgaacaaaacataaccgcgcgaagccgatgtctgagttggcatctgccttattttcaatagcagatgccggcgagtttcggttcgcgcggtttttatattgtctgtgaagaggtgccattagggacaccagaaagtccgctcattgtctgcggcttgtcggacacactccgtgagtgtccaaacgtggccaagacacggaatgggatgccagccacggcatggaagaaatacacgaattttgcttcaaagaatttgccgccgtctgtttattctggaactttttgttctctggtattcctgtaatattacttatcaaagcaaagtgcgatatgcttattgtgacagttccttttattaaatctgtaaagaggtgtgccaagcgctgcccaaaagtccactcattgtctttgctgtgcggacacacccgcatagagtgtcaaagcgtggtaagagacacgaacccggatgttccagtcggcatggaagaaaccgcgctattttgctcaaacgaatcgtgactcccggcagccggcagaagcttgcggatttcttccggacgtcagcatgaattgctgaaccgccccgttctatgccgtgtggagcgcctgccgggagattgctgtctcggcgtcggtgtccgcgtcgtgcaggcggtggtactcttcgataaaaccgttcattttgccggcttcggcggcaagctctgcgatgacgttgttgacgctcttgaagcgctctgcattgtcggtacacattgcgttggtctcctccgcggaggcactgatctcctcgcttgtcgaagagagcgtgttggtctcatcgaccagcatggtgttggtttcctttaaaatgcgtgtcttttctgagattgcagcggcattttgttcaaggccggtaagaccggagcggatgccgctgaaattttcttcaatatcatgaatcatgctgacctgattgccgattttgtccatgacatgatccatggaggcaatcgtgtcgccggcatttttgttcagctttgtgatgatttcttcaatattttcagtggactgtttggtctgctcggagagcatgcggatctcctccgcgacaacagcgaaccccctgcctgcttcccctgcgcgcgctgcttctatcgtggcgttcaaggcgagaagattggtctgtgcggaaatctgctggataatgctgataatttttaacatgtcctgcgtatgtgcctgcagtgcagtcatattttccttgacgagcttattctcagattctacttcccccgtctgggagacaatattgctcacaagcgcctgaccggtctctacatttttaccagaagactgggagatgttggtaagtgcgtctgcgatcgacacggtatcggcaatgatgtcctgaatccgtccggtcatggaagcctgttcctgaatgcttgcgactgtgctctccatgcttacggtaatgtcgcccattgcctggctgacgcagccggttgcctctgtcatctcctcgatcagcgcatgaatggactgggtggattcattgacggatgtgccgacggtcacgatggaattcatcatatcctcctgctttttcttgtgggcttccagttcggcgagttcctctgtgttgtgcaggacggccacgcgggacgccaggcaggtgattgtgttgatgacaataataatggagcagatcacaaagatcatattggtttcggaaagagagttggttccaagcacatggacagagtaaacaccgtttaaaatacagcagaccatatttaatacaccggcgcagatttccagcttcaggtcaaagtacattaacagtgcgacaagtatgggaatcataaagagattatagacaaaaagttttgaggatagacagctgacttcataaatgatcagaaagcatgtaagtgcgacattgcggtagcgtatggaaactggattaaaaaaatagaacaatgtactaacagctgcagggagggcaatcatgccagcaatgacaaaaagacggaaaagagcatgatttccctgcagaatggttccgataaacagaaacatcatatagatggaaatgatgagaactgtaagcatcagacaatagttggcacgctttgtggagcgttcctgtaatgttaactctcttgaatcgttcatgatagacctccttttcctgtacgaaagtaccagatgtttgtgatactaacatagaccttggtgcaggtctaaggtcaataggaggttgaaaaaatcaggagtcttccaacggaagatatacttcgtaataatccaggatgacatccggctgtgctatgctgaagacgtagaaagcgtaagcttccggtttgcaggaaagctgatgctccccggcgtatttcaggacggcggagagatcccagagtatctcctgctcggtcgggaatgcgactacggtgtagagacagcggcagctgtcccggctgggcagattggtggaattgagcttggtgagtgcaagcatcggctcgcggatggcaaactggaaggcgctgacctggcaggaaccggacggttccacggagaggatgtagctgaaattccccatcgaaaacagcggggaatgaaagacatcctttagcgtgcggtaacctaaaaaagcggaatcctgatggtagagcggatagacagcgggaagcgtccggatgcttatagtgcggctgccttcatccagggtatccaggtgctgtttcatataagacattttttcgacttccagggtaagccgcccgatctcttttttgcgcgaatcaatgaagccggaaaagctttcggaaagatcaccaagggtggagacagcgagaagccgcttgatctccgcgatgctcacgttgagcttgcggtagagacagattcccatgatgcggtggatctgttcggtgtcatagtagcggtagccgttttccggattgcgcgtgggcgtgacaagtccctccttctcgtagagccggatggcatccgtggagatattaagtaaagcggcaacttcatggatcgtatattgtatcatgacagacctccatagaaaataagaagtatttcaatcacaagatatgtctcattgtaccatattctgacaaaaaaattaaaagaaaagaatgaagaaaaaaggattttatggtacaataatacgtcagagaacagagggcaaaagcaggaggagaggttatgttttccgtatcggatatcaaggaggatgtgtatccggcagtctaccggagaggaaaggaattatatgagacagggggcgtgctggattttgcgtatgatatttacctggagcatgatctgcccgtcgccgaagtgcgggcggaagtccgtggaagagaacagggcagctaccgggtgacggtaattgtcgatgaggaatacggctcggtgtcgagcagcaactgtacctgcgaggcattttataattatgaggggatgtgcaaacactgtgtcgcagcgcttcttgcctacgtcaaccgcagacaggcgaaggacattctggctgcgaagcgcaccggacatgaggtgggagagcagggaagcgccgcggaggagaagcctgccgccccgatgcagacggcgggagcgttcaagacgcttttgaaccagtattcactgcgtgccggcgtgagctatctgattccggagagcgtctatggaaaggtggaactggagccttattttaagatggattacagttatgcgacggtggagtttaagatcggaatggagcagaagtatgtattaaagaatatttctgcctttttacattccattgagcggaatgaaaaggtgcattacggcaaaaagctggacttttatcacaacagacaggcatttacagaagatgcatggcggatggtagagtttatgcggatgcaggatgacgacaagaagcgccagagcagatttcatgcctattatgcttacacagggggatatgagcgcacgatggagctcgatgaggtcggcatcgaccgtttttttgacgccatcggggaaatgccattatctgccgaaatcgggtatctgccggaggaggagtatcatgtgcaggaggaagagcgcaagccgaagcttgagatacgcgcaggggcgtctggtgtgttccttgtgctggaggatctgcacgtcataaggggaagcagattttactatttttatgaagatggcatgatctatcgtagcagtgaggctttaaaggcgaaggcgggagatttttttgactatatggagcgccagaccggcggggaatgttatattgccgcggaggaactgccatcgttctgcagagatctgctgccgcttttaagagagacgttccgggtgacggcggagggcttcgatgagacgctctacgtcccgaaaaagccggagtttgagctgtatctggataagcaggacaaccagacggtcggtgcgaagctggtcgctgcctacggggacgacaaatataacgtattgcagaagattgagccgggcgaggtgcgggatctcggggaggagatgcgcgtgcgcacgctggtcgagccgtacttcaacgaatacgggctcgggcagacgatattcattctctcgcacaatgaggacatgctttatcagcttatcagcagtggtctgcagcgcctcagcgagtatatgtcgatctacacgacggaggatttccggggaatgaaagtcgtctcatcgccgtcggtttcggtgggcgttgcgctaaagagcgatcttctggaattgcagattcactcggatgagatgtcgcgcgaggagctggcatatcttctgacccggtacgaccggaaaaagaaatatgtccgtctgaaaaacggagattttcttgatgtgcgcgaggatggtctgggactgctcgcggagatcagcgaggatctccgcctgacagaatccggactgaaaaaaggtcatgtgaatgtaccaaaataccgcgcgatgtatctggatgcggcattaaagagcaaccaggaactttccgtggagaaaaaccgcgagttcaagggcatggtccgcaatatgaagacgattgaggacagtgattatgaggtgccggattcgctacgcagcattatgcgcggctaccagaagagcggttttctgtggttaaagacactgcgcgagaacggattcggcggaatccttgcggacgatatgggactgggcaagaccctgcaggtcatcagtctgctcttgtcggaacaggagagtgccaaggcaggagagcgggagtggcaccgttcccttatcgtatgtccggcgtcgctcgtctacaactggcagaaagagatcagccgttttgcaccgcagatcaagacgacgctcgtgaccggactcgccacagagcgccagaggattgtcagacacacgaaggaaggggaagtgctgattacgtcctatgatctgttaaaacgcgacgtggagctgtaccgcgatatggtgtttgcgattcaggtgatcgacgaggcgcagtatatcaagaaccctggaacccaggcggcaaaaggcgtcaagcagattactgcgggtttcaagctggcgctgaccggaacgccgatcgagaaccggctgagcgaactgtggagcatttttgattatctgatgccgggatttttatatacttatcagcggttccgggaggagatcgagatcccgatcgtggtaaacggggatgaaaaccgtatgcagcgcctgcagcgcatgatccggccgtttattctgcgccgtctgaagggggaagtgctgcgggatcttccggcgaagctggaggagaatgtcttcgcgaagctcgaaggagagcagcttgcgctctatgacgcccatgtgcagcgcatgaaggagagcctggagggcaaatccgagaaggaattccgctccgagaagatccagattcttgcggaactgacgagactgcggcagatctgctgtgacccgggacttctgtttgagggctataagggagaatccgcgaaggcgcagatgtgcatggaactgatcgagaacgcggttggtgccgggcacaaggtgttattgttctcgcagtttacgtccatgctggaacgtctggcggcagggcttaagaaggccgggattgactgctatatgctgaccggttctgtcggcaaggaaaagcgcatgcagatggtagagagttttaatgaggacgacgtgccggtgttctgcatttccttaaaggcaggaggaaccgggctgaacctgacggccgcggatattgtgatccactatgatccgtggtggaacgtggcggtgcagaaccaggcgacggaccgcgcccaccgcatcgggcagaagcatgttgtgacggtctacaagctggtatccgagggaacgatcgaggagaagatcattgcgatacaggagcgcaaaaaggaattggcaaagcaggtgctcgagggggagggaatggactctgtttcctttaccaaggaggaaattctcgaacttctgggataaaaaggttgttttttcgacaaatcagttgacaaaaaatgtgggctgctatatagtaaggaaacagcattattgatgaatgcagattccgtgagggagtagttcgcgcagagcgtgatttgtcaacagaccggtcggacagcctgacctggcaaatcttaaagaatgagactcatgtatatctttggtgttatatcgcagacggagacgggagcggtgcgcagaggatatacatcagtctcttttttatgtgtgcgccggcggaaaatgcatcatccgggctgaatgtgtatgtgtgccctgtggcaggggcagaataaaatgtggaggttggtatggctgtttttattgaattgctgctcattggagtgggtctttcgatggatgcgtttgcagtgtcgatctgtaaaggtcttgcgatgcgcagggtaaataagaagcaggcgtttgtgatcggtctgttttttggaggatttcaggcgctgatgccgtttatcggctgggcgctcggcacacagtttgagagctacattaccagtattgatcactggattgcctttgtgctgctggcattcatcggcggcaagatgattgccggggcggtgcgtccggaggatgagaatgtggagatcgacaagctggatccgccactcgacttaaaagagatgcttgtgctggcggtggcgaccagtatcgatgcacttgcggtcggaattacattcgcatttttgaattacccgatcggggaggcggttacgatcatcggtctcaccacgttttgtatctccatcggcggcgtctatgttggcaattttttcggaaaccgctataagaaaaaggcagaacttgctggaggtattatcctggtgctgatcggcgtgaagattctgctggagcatctcggatttgtgggataggtgccggattaccggaagtcgagataactttgagaaaataattacagtagagaaaacagagaggaatggagattattatgacagaaatgctttgggcagctgtgctgcttgttgttggatttgtgcttctgattaagggagcagatttttttgtggagggaagctcttccgtggcaaaaatgctgaaagtgccttcgatcattataggacttacgatcgtggcgatggggacgagtcttccggaatgtgcggtcagtattacggcatcggtaacgaacaataatgcacttgcagtcagcaatgctattggctctaatatttttaatctgatggtggtctgtggattctgtgccctttttaatccactctatgtggaaaagagtacgttaaaaaaagagtttccgttttctgtagtctgtgcagtcttgcttttagtctgcggatatctgggaatgcagcttggcagggcagacggaatcatccttcttattgtatttgtcgcttttctggtctggatggtgcgctcggcactgaaagcgcgtgctgctgccggagatgatgagtatgaggtattgccggtgtggaaatgtatcgtgtttatcgtcggtggtattgtggcgatcaagttcggtggggattttgttgtaaacggcgcatccacggttgctgcaaagctgggactcagccagaatctgatcggacttacgattgttgcctgtggaaccagcctgccggagcttgtgacctcggtggttgcagcgcgcaaaaatgagctggatatggcgctcggcaatgtgatcggctccaatattttcaatattctgtttgtgctcggtatcgcagcgacgatcagtccgatcacatttatcatggaaaatgtgatcgatattgtgattctggttgcgatgagcgtactggtgtgggcgctcgcctggacgaagaagaagctggaccgcttcgagggcattgtgatgctggcgctctatgtggtctatcttgtgtatatctgcatgcggtagcatgaaaagattttgcagaaaaagatttttcctgctttttcgattgctgtaaaggaaaattggcgttatactggggaaaaggaaacgacagggaggaaagcttcatggaattttttgataagttaagcgagtcactggtaagtgcggggaaggatgtcagccagaaagcgaaggacgtatccgagatcgcaaagttaaagctggatatcaaatccaaagaggattatgtgcagaagcagtatgaggagctgggacgctcttattacgagaagcacaaggatgaggaaggatgcgaagcggcagagcagtttttcctgatcaaggaagcggtggaggagatcgagcgcatgaaagccgaggtactgcggatccaggggtctgcggaatgtccaaagtgtggtgcaaagatgccggaaggcgctgtatactgcagcagctgcggtacgaagatggatgatatgtatgaggaagagtagcagatacgcggcataccttccgtttgtgctggtggcggtgatcggactggtctaccacgtcgggatgaagccgatggcgggggacgacatttttttccgggatgccacaaaagacacgacgctgtgggcgtatctgacgcagcgctatctgacctggacgtcgcgcgtggtgtcggagtgtgtactggtcaatgtcatacagtgcccggttttgtggagaattattgattttctgctgtttgcgacgctgcctcttctgctgtccgggcttttcggcggcgggaagacgatgaactggtgcgcggcagcggcggtgctgatttttccgtttcacgacatgggtacggcgggatggattacgacaacagttacacatttctggccgttctggggatttttttatgtggcgtgggtgataaggaagcttgcgcttgcggagaaaattcacccggcagcggcagtgtccgcggttcctgtcgcggttgtgacaggaagtcatgaacagtatgccgtgattatgacgctgctgctcgtgcttagcggcgtgtatctgtggaaagcgcacagaaggccgggaaatgcagtgcttttttggactcttgcggtgatcgatgtggtttcactgctcgtaattgcactctgtccgggcaatgccggacgcaatgcggtcagtattgcggatcttccggtttatgcgacgtttggattcggacagaagctgtatctgggacttttgagtattgagcgcgtgtttattgccaatgcggacgttgtattttttctggtggtgctgatctggacatggcttgtctgggagaagacaaaagattaccgcaggacgtttctctcggcgcttccgctgctcattctgttcgggcagacagtgttaagaactgcatatccggggctctcggggctgttcgtgatgccgggggagattctggagtggagctggagcgatctgtcgacgtggattcctatggtgtatctggcagtgacggtggcagcgatgatttatgcgctgtaccagctgttcggcgacgatctgtttaccttcatcagcgtgctgcttctggtggggtgcggctttggtgccgggatggtgctgggctttatggcgacgatctacgtctcgggagagcgcgtgtatgcgccgctgtacgggattcttctggcggtcacactgtttggcatctgccggcagcgcagcgtgtggaaggagccggcggctgtgtcttccgcagtgttcctgacggcgctgacagttgtctgttgtgcggtgaacgtattgtttatcgttttgtcattgtaagaccggaagtataaaagatagaatatgagttccatacagggagcagattctgcagggcagaatctgctccctgttttttgacacacagtcagagagaggatataatcattattaaaaataaatccagttaaaggtgaaatgaaggttattgaaggtataggggtaaacggagagatggagttgaataaggaaaagaaaaatataattggcattacacaaagcggtcttatattggtattggtagttcttattgtctttatgatggtacagatcaacaggttacaggggactgcacgggtaataaattatgcaggtctggtacgtggagccacacagcgtgaagtgaagttagaaattacaggaaaccagaatgaagaattagttcaatatctggatgatattctgagcggattaagatatcaggatggacattatgatctgataaagcttcctgataaagaatatcaggataaattacaggttcagagtgactactgggaaaaattaaaagtagaaattgaagcggtgagaagcagaggatatgaaaatacagatattgtaaatatgagtgaaacttattttaagatggcagatgaaacagtatctgcagcggaaaattattcagaaaagattgcaagaaagattcgtaccatagagattttgtcagcacttgatatgttgtgcctggtaatattggttattatgcagacgctgatggcaatgaagatggcagtgcaaaacaagctgttagaacagagggcatatacagacagccatacaggattacccaataaaagtgcatgtgagaaaatacttaataataaagagatcattgatgaaccgacagcatgcataatgtttgatctgaataatttgaagacggtaaatgacacaatgggacattcgtcaggagaccagctaataatgaattttgcccggcttttacgcagtgtgattccggaagaagattttgttggaaggtatggcggggatgaattcatggcagttatatatcataccagtaaagcggaggttgaggatattttaaaatacttacgcaaggaaaaagatagattaaatggcaatgaaaatcttatgtcaatcgattatgcatgcggatgggcgttatccgaagactataaggagtgtacaatgcagatattattggataaggccgattcttatatgtatgataataaacaattatgcaagcagcataccctttaggtattttatggagcgtcggcaggctgatcggaattgcgttggagcagcttgaaaagtgaaatgttttccatgttttatttgacaaaagaatgcggcggtgatatatataacacatactgttatatatatcaccgccgcgcttttgttgtgccggaaaaatattgctcatcatgccaaagaagcgcagaaatacaggcagaaagtacaggaggagaccgatgcttaccatcatggagcggaagaagggcgagtccgcgcgggattacgtgacgcgggtgctcatagacaatatcgtaaatgtgcatttggaaccgggggaaaagctgctggaaaatgatctgagcgggcagctcggggtgagccgcacgccgtaccgggaggcggtacttgcgcttgcggagcggcagctcgtgcatataagaccgaagaaaggcacctatgtgtcgcacattgatttgaaactggtcgaggaggtgcggcatctgcgcagcattgtggagaccgagctggcagtcatggcatgtgaccttctgacggaggaggatctggatgtgctgcgcgagaatattgccatatggaaaatgtacatggagcggaagcagacggataagattctgcagtttgacaaggaatttcaccgacatttttatgaaatgtgcgaccggaactactggtatacgctgctggagagcctttcgccgcattttgaccgcacgacggtgctaagcttccgctgccgcccggtcaacggcattgtatctgaccacgaggagctggtggatgcgattgcggcgagggaccgggggcgggcggcggagaccgccagacggcatatgctccgctacaccgagaatattgatacgatccggcaggcatttccggaatattttgcataggaaaggagacagagggttatggaactggcaatcattacggcaaaacaggtcgtgatactgtactgtctgatcctggccgggtttgcgggggtaaagagcggtgtgataaagcaggaggcaaaaaaggcgttttccaatctgctgctctacctggcggtgccggcgatggtcattcattcctatatctcaaaggcggaccgctccgtgcttgccagactgccgcagacgtttgcgctcagtgtgctggcgattctggccggacttgcgattacgatgttatgtacctgccggatgaaagggaaggagcgtccgatcctgcggtttgcctgcatattttccaatgcggcatatatggggttcccgttgattgaggcgctgttcggcgcggaaggattgatctatgcgagcgtgtacgtgacggtgttcaacattctgctatggacggtgggatttggcatgattacaggaacggtgaaaccgaaagaggtcgtccgcacagtctgcacaaatccggtgctgattgccgtggtgatcggactggtgatctacctgtgccagattccggtgccggaggtgattgaacagccgctcgcgttgatcggaaatatgaatacgccgctctccatgattatcaccggaatgatgatcgccggaagcaatctggcgcagatgctttgcgaccggcgcattttatctgtggtgggaatccgcatgctgctgatccctgccgtgtgcttcgcgctgttttttgcatgcggcttttccgggatggctgcaggcgtggtgctgctgctggaagcatgcccgagcgcggcgatcacctccgtctttgcggtgcagtattcgtatgatgaagaatttgcggcgggcagcgtggtcattacgaccctgctcagcattgtgatcctgccggtatgcgccatgcttctgccgggaatgtagaaaaccgcgggaagaagtcatgtggaagccatatagcgggaagaagccatatggcggaagaacccggagatggcatgggaagcaggcaggataagaaaaaggagagagtcacatggaaatcagatgtgtgtatacagaaggaaatcagaatgtcattcaggaggcggtggatcgccttcctgcgtcgggaggtacagtaatcgtgccgcgcggcgagtggaaaagcggtgcaattcatctgaaaagcaatgtgaaactgtatctggaagagggatgcgtgattcatttcagttcctgcatggaggattaccttcgccggtatttacacgctgggaaggcgtggaatgttacaattattcgtcgcttatctacgcggcagactgtgagaatgttacaatctgcggcaccggtgtgttagacggtgcgggaagcgcgtggtggcactggaaaaagctccagcagaatgcggcggatcgcctgatccgggcggaaagtcaggggattgtggtagaagagcgcgtatttgcgaccagggaggatgcgctccgtccctcgttcatccagttcataaattgtaagcacgtaacgttggaagattttacgatcgaggacggaccgcagtggacgatccacccggtgtattgtgaggatgttgtggtgcgcggggtgacggtgaacaccaagggaccgaacaccgatggctgcaatccggattcatgtagaaaagtgctgatagaggactgcacctttgataccggcgatgactgcattgctatcaattccggcatgaacgaggacggatggcgtgtagggcgcccctgcgaacagatagaggtaaaaaattgccgctttataggcggacacgcggcagttgcaatcggaagcggaatgtccggcggcatttgtgatatctggatccacgactgcgtggtcagagggaccgagcgcggcatccgcatcaaatccatgcgcgggcgcggtggctatgtaaagcggatcaatgtggaacggatgcagatggatgagatagaaaaggaagcgatcgaagtgagcatgaattatggttccagcacggcgatgccggtgtcgcagaaggcgccggaattttcggagatccgttttgcccatataaggggaaaccatgcagccgtcggtgtctcgctctgcggactgccggaaagtccgctgcgaaaacttaccctggaagacgtatcgatcgctgcagaagacccgctgagggaagagtatgtggaaaagtaaaatactttttctctggcgctcttgtgcttatgaacgcttgactttccgcgggtttggtgctaatcttagaaaagtcgatacacacaaacacgaggaagaagagagtacatctgcagatactttacagagagatttccagctgcgcggtcgcagcttgctgcgaggaaatgaggaagggcggatggaagatggctttggagtggcaggactgaacactggacgttactaaggacagcgataagttctgacgggaccgcctgttacagcgggggatattcgttgcgatatccgcagaggcacagagtgcagattctgtgtgaatagaagtggtaccacgggagttatcccgtcttctggtggctgatacagccccgaagacgggattttttgttttattaggaaggagcagacaaaatgagtgacaagggaaaattttacatgacgaccgcgattgcctacacatccggcaagccgcatatcggaaatacgtatgagatcgtgctcgcagatgcgatcgcgcgttataagagactggagggctacgatgtttatttccagaccggaacagatgagcatggtcagaagatccaggagaaggcagaaaaagcaggcattacgccaaaagaatatgtagacaatgtggcaggcgaggtaaagcgcatctgggatctgatgaacacgtcctacgataactttgtccgcacgaccgatgcagaccatgagaaacaggtgcagaagatttttaaaaagctgtacgatcagggagacatctacaagggatcttacgagggactttactgtacgccgtgtgagtccttctggacagagtcccagctggtggacggcaagtgcccggactgcgggagagaggtaaagccggcgaaggaggaggcatacttcttcaagatgagcaaatatgcggatcgtctgatcgagcatattaacacccatccggagttcattcagccggtatccagaaaaaatgagatgatgaacaatttcctgcttccgggattgcaggatctgtgtgtttccagaacgtcattttcctggggaattccggtggactttgacccgaagcatgtggtttatgtatggctggacgcgctgaccaactatatcacgaagatcggttatgatgcggacggcaattcttccgatttatttaaaaagaactggccggcggatctgcatctgatcggcaaggacatcatccgtttccatacgatctactggccgattttcctgatggcgctggatctcccgctgccgaagcaggtattcggacatccgtggctcttgcagggcggagacaagatgagcaaatccaagggaaatgtgatctacgcggacgatatggtggatctgtttggcgtggatgcaacccgttactttgtactgcatgagatgccgtttgagaatgacggtgtgattacctgggaactggtggtggagcgctttaattccgatcttgccaacatcctcggaaatctcgtcaaccgcacggtttccatgagcaacaagtattttagcggtgtggtaagaagcacgggcgtgacagaggacgtggacgaagacttaaagacagttgtgaccggagccagagacagagtggcacagaagatgaaggatctgcgtgtggcagatgccatttctgaggtattcggcgtgttccgccgctgcaacaaatatatcgatgagacggcaccgtgggtacttgcgaaggacgaggcaaaatccgaccgtctggcagaggtgctttataatctggcagagtcgattacggtgggcgcatccctgctgtacagcttcctgccggagaccgcagagaagattgtggcacagcttcatacacaactccgcggttttgaggaactgaatcagtttggtctgtatgagaacggcacgaaagtgaccgggacgccggagatcttattcgcacgtctggatgcaaaggatgtgatgccgaaggtggaggcgatccgcgaggcacagaagaaggagtttgaggcggagcagaaggcgcttggcgaggaggctcctgcagaagaaaaagcagaagacgtcatcgacatcgaggcgaaggaagaaatcacctatgatgattttacgaagcttcagttccaggtgggagagatcatttcctgtgaggctgtggagaagtcgaagaagcttctgtgctcccaggtaagagtcggcagcgaggtgaagcagatcgtttccggtatccgtaaatattacacgccggaagagatggtcggtaaaaaagtgatggtactggtaaacttaaagcctgcgaagcttgcgggagttctctcagagggcatgcttttatgcgctgaggatgcggaaggcaatctggcgctgatgacgccggagaaaccgatgccggcaggtgctgaaatatgttaaaaggagacaccggagcaaaacggacatggttttatgaaaacggtgcatttgtggcggcggcgcttgccgccgtcctttggcatgtggtattgtccacgaatgtcggcgatgatatggtctattttaaaacccttctggacggtaacagttcactcggcgagatcctggcacatcgctatgagacatggtcatcgcgcatggtgatcgaggcggtgttaattccactggtgcactgtccgctgctctggaaaatccttgatattgtcatctttacgtccctcccggtgctgctctgcggactgctgggtgtgaccgggcgtggacgctggtttgtaaccggactggtgctgctctatccgtttgcggatatggcatccgccggatggattgcgacgacgaccaattatctctggccgctctggggcgttctggtgatcggcatggtgttaaagcagcttcgctgcggcagaaaagtgccggtgtgggaggcggcagctgcgtttctggcgtgtgcttatgcgggcagccaggaacaggctgcggtgctgctgcttctgctgcttggcatggaagtgctgcattatatctcggaaaagcgtatgaaacagccgcttctctatgcattgtgcggcatagatattatttccctcatatatattttcagttgtccgggaaatgcaatccggagcgcgcaggagatggcggggagaatgccggagtttgctgattttacattcgcagagaagctctacatgggacttgccaatgtggaacggatctttatcgcggagcttgatccggtctattgcgttgtggcagcagtgcttgtgctgcttgtgtatcgtaagacaggcgattaccgtaagacgcttttggcggggattccggcgctgctgctgtttggacaggcggtggtgcgtgtcagccaccctttctttgaaaaagtgtttgtgctgccggcacaggcaaccagctggaactggggtggcgcaatgacctatatgccgttgatctttctggtactgtccgtttttggaattctgtacgcgttgtggcagctggcggatggagcgtggaagcattacctgtggacggtgtttttactggcaggcggatttgccacgggggtcgtcatgggattttcaccgacgatttacgcatcggcagaccggccgtacctctatctgtatttcgtgctgatctatgtgtgtacggatgccgtgtggaacttgggaggcatgagggccgtctggaagacaggcagtgcagatgctgcgcagagcggaagcggtgcacacagtaaggggaaaatgtctgtgccggaaaaactgatgtttactgtactcgggcttctggtgctggcaaacattctggatgtgacccggatgtgctggctgcttggaaggcttctgtgaccgtttataacagaaatccgctgtttcatgcaggaaacctaacgaaaaatccaatttcagccgatgtataccatatgaacggattcagtcagggatacattcagggaggaatgtggatatgggaatcagcatcaatgcaccgggaagtgtgaacagtcaggcatcgatgacaggcacactttccatccgaaaaagcacaaatacatttgagcagatggcgggggtcagtagttcagggggaacctcgaaaaaacagctcaattataatcacagagatatttccggacagctgctccgggcgaagaagccgcagagtgcatccgcggcgctgacccgtgcaaagagcaaggtgtctatgcttcagcgtgcggcggcatccggacagtatgattccagggaagtggcggatgcgcttgcgcatgcgagacggatggtgcgctgtgcgcagcttaaagtgcgcaatctgcgcgaggaagagcgcgagcagcagtctgcgcagaaggaaaacagtggtaagagccagcagaaggaacatgaagtgaagcgccgtgtggcacagaaagagcgtcaactcaagcagaaggtagcgattgagaatacacaggaagtgcttcggcagaagaaaaagaagaacgagatggcgcagaagcagcagagacaccgctcgcaggagcgggggaagattgcggaggcggatttcaaatacatcaagtcacagctcgaggctggcaaaggctttggcggcggcagttcttattgtgaggacagcggatttacgctggatatcagtgatgccgcaatgtcgatggcggaacttgagatgatggcacagaatcagaccgaagcggaggcagaggcggaagtggaagcggagatgtcacttaccgacggaggaactcttgcagctgcgaccgcgggagccgtgccggcaggtacaggagcgggaactgcatcggacacagcgccagccgctgccggcgcatctgtggatgtgtcagtgtgagaaacagacgaaaggggctggatgctttaagcgggcagccccttttgatgtgctaagtaataggagaaaaagatcatgccgttcgatttcagatggaaatgcagatggaacattcgttggagaaaaatgtgagcatttcttcctgccggatttttgcatcggattccgtgtctcttccacgttttgacacttcacggaatgtgtccgacaaaccgcagacaatgagcggattccctagtgtccctagcggcactgcttcacagacaatataaaaccgcgcgaatcgaaactcgccgtcttctgctattaaagtcatggcagaagacggcgagtttcggttcgcgcggttatgttttgctcgacataaagatggcatttatgccatctgttgtctggtgccacaagggacacacgagaatcctaaaattgtctgcgggttgcggacacacccgtggagtgttcaaaacttggaaaaacacggatcatcgcagatgcaaaaaccggcgggttagaaatgcagcattttttgatccgaatttccagatgaattccatctgaaaccgaagggcatatgtttttcgtatattacgtattagttcagaaggggcggttcgcttaaagcgacagcccctttctctgtctcgctgcgacagcagtcagggcgaacatggcggcggcaaagaggaactggatgccgatgcatttccagtaaaagcccaggtcgaagacttcctttccgaatcccgccagcatattgttggcgcggatgtaccagtaagcgggaaggaaacgtcctacggcaagtacggaaccggagagcatggactgcgggacaaagacaccgcagagaaaggacatggacagaccgacgatatttgccagcatatttaatacgttgtcatccggcgagaacgtcgagatgagcagggagagtgcagccgtaaaaaacaggaaagcgaggctgtttaagattgcatagccgacatacggctgcagcatggctttctggtagaatacgagaccaagcagcagaaagagcagccagatgccgagactgtacaggagacagccggatgccatggcaagagtacgtgttcttccgggaagagcggagcacgccgtccgggctttcatgtcgcggctgtttaaggtaaccagaatcggagccatgccggcgaacaggattgccagaaagatatacggaagatactggaagaaataaaaaaccatgctgttggtgtcggcgtcggacatctgaaaagatgtgacggagactttgggaaggtcggaaatggtatgatccgtatggtcgatggcctcggcaatggtgtcactgcccgccaggtagagctgcagtgcctgcacatactgcgtaatctggttgtccacgtactggctgctgctgcttcccggaattgtcagggaggagacaaggtctttggtctcgccggcgagcacccggtcttcaaatccttccgggatgaccatggcatagttgagcgtgcggtagtagattgcatctaacagtgcggtgtcctctccaggctccggtgttgttacctggtggatggatgcgaggtaatcgcacagagcgcggcttgcatccgtgttgtcttcatctgtgatggcgatagagcgctggctggctttgaagttctcgttgatggaatcctgcgagagtgccgacagcagcagcgtgatcaccgcgtagacgcccaaatagatcaatgcggcatttcgccgtttttttgcgattgcgaaaaatgctttaaagactggcatattttttcctccttaccagtgcaagactgccgagacagaaaagtgccgagagtaacaggagtcctgcgatatttgtaaaaaaccgtgtgtaggacgggtacacgacgagtgaatacagcgcatcggagatgagagctgcaggattgatgcggttgagcagcgggcagaaatcttccacaagtgcacgcatgtttccgatcatcagaccgcttaaaaagcagcagatcataattgcagccatcaggaaaccaaacttggtctctttggaaaactgcccgatacaaccgaccagaaatcccagactcagcccggcaagacaaccgcagaggcaggtcagcgccacaccgccgagatggtttccgaaatcaaccttaagaaccagtgtcagataggcaatggtgatcagcaaggaggaaaactcaaaaatcagagctccggtcagatcaccgagggtggcaagcagccggggaaccggcgagacattgcgtctggcacccagatctgacagatttgcctgattggagatggcgagcgtgttgccgatcatggcagcatagaggcaggtcatggcaatcagattgaaaaagtaagtaagggattcatccacggagccggcaccaagggattcgtgccggatatagctgacttccgtagaaaccgcatcaagcagtgccggaagtttcgtgggatctttcattgcggcctgggcgatggcactgtattctatgttgaaacgatccacaagcacacttaaaatactctggtacagaggatcggaagtcatctctgcggagagtgtcagcgatagaggatacgtggaaacatccttggcggatgcggcatttctataatcggaaacggttggcagatcagcggtaatgatgccgtagacttcttttgctttcagcagttccttggcatccgcagcggaagcataggtaacttcaaggaactgatcttcgccgggtttggacagggaatcaaacatggagcgcagctcggaggattcctcttgcatcacaactgcaaccgggatggcggaaaaactttcgccactccccagtccgccgaatgcaaaatggaacatcgttccgagcagaagtggaaaagcgacacaccagaatacctgacctttatcccgcagcagattaagcagtgtatatttcatcgtatgaaaaaacatggtggtacctcctaatcacgaagttcttttccggtaatttccagaaagacgtcatttaaggtcggaagttcggaatagactcttccgaaagacacattctgttcctgcagatagttcagaatgtgcggcagattgtgggaaccgccgctgcacagcacttttaagcagtgatgttcaaaggtcacctcatagacgtgctttatgtcacggatcgctgaaatctgcgcaggaagaagatccagaatatcaatcgagatgatctcgctctttttgatcattcgttttaactcttccgtggttccaatggcaagatttttgcctttgtccataatggcgatccgggtacagatctgctccacctcctccatatagtgggaagtgtaaatgatcgtggcgccattgcggtttaactcctggattccctccagaattttattgcggctctgtgggtcaaccgccacagtcggctcgtcgagaatgatgagctttggcttgtgggcaattccgcacgcgatattcagacggcgcagcagaccaccggaaagctttttcggataaaatttgcggaaatcgttgagaccgacaaaatcgatggcatcttccacatactggcgccggagcgctttgtcgcggatatacagaccacagaaataatcaatgttttcatagacggtcaattcctgaaagacagcgacattttgcatgacaacgccgatctgacgtttcagatcgtagctgtccggccgcatttcctgaccgaagacccggacggttcccttgtcaaaggcaagcagtgcaaggatgcagttgatggttgtcgtctttccggagccgtttggtccaagcagaccgaagatctcaccttcctcaattgtgagattgaagtgatcgagggcgacaagctcctgatagcgttttaccagattttctatttctacaacaggtactgacataacaaatcctcctcgtttgatggtaattacattatagcgggtggcgcccggcggtgccagtgagcagcgtcagatgtttgatgtgacaaatgtcatgaatctcttatttttcaaaaaagatgtggcggctgtcttataatgatgatatggttatcataacgtgtgcgggaaagtggaagatatcccggaaatatggcggcatatgtggacagggagagggtagaatgaagcggattgtggataaaggactgttgcttgccggcggtctgcttatggcgggacagtcgggaaggcttgcagcgccggtcatagcgttgctgttggcgatgactgcggcggcatatggcagctgtgtggacaacagacgatggcattgtgtgtgccttgcggggatgtttgcggtctgctttatcctgccggaactctgttttttcgtgccggttcttctgtatgactgtgcggaaaaaaaggagatgcggctctggttcttgagtgttccggggctcgcttttttctatcgggaacagatgatccggcagccccttttgtgggcggcggacggtatgctgatcgtggctgcgatattgctggcgtacaggacgggcagaattctgtatctggaacaggagatgatccgtcttcgggataccagcacggaattgaatctggtgctgcaggaaaaaaacaagaacctgatggaaaaacaggattatgagatctaccttgcgacactgcgggagcgcaaccgcattgcaagagagattcatgataatgtggggcatatgctttcaagaagtattctgcagatgggggcactgattacgattcataaggaggagccgctgcacggacagctcgccggggtgggggagacgttaaatcaggcgatgaacagtatccgtgagagcgtgcacgatctgcacgatgagtccattgatctgcggcagtccattgcggaggcgacccgtgagatgaaggagcattatcagctcacggtcgattatgatatgtctccggagattccacgcaatgtaaagtattgttttatcacagcggtaaaagaagccatgtcgaatattgcaaaacactccgatgcggataagatctccgtgattttgcgggaacatccggcgttctaccagctgacggtcgaggataacggaacggtggggcgtaagggacagagcggactattgtgggaggaagaggtcgtccgtatggacggaaaggaagggattggtctttccaatatgaaggagcgcgtgcaggcactgggaggaaccttccggattcatacggaaaatggatttgtgatctttatttcaattcccaagagggataaaatgtagatacggtaatgatgactgggagagagaaaaatgagagttctggtggttgacgatgataagctggtggcagtatccctaaaaacgattctggaagctgacggggagattacggtcgtgggtctgggagaggcgggagatgatgccatccggctttatcgggagcagcatcctgatattctgctgatggatatccgcatgcagggaatgtccggattggatgcagctgaatgtatcttaaaagaagatcaagcggcaaaaattttgtttttgacaaccttttccgatgacgaatacattgtaaaggcactgaatatgggagcgaaggggtatctgctgaaacaggactttgagtcgatcgttccggcactcaaggctgtctacggcgggcagagtgtattcggcggacagattatgggaaaaattccggtgcttctggcaggaaaaggcagcttttcctatcatgattacgacatcagtgagaaggagcagggcattattgaactggtggcagaaggcttaagcaaccgggagattgcagaaaaattgtatttgagcgagggtacggtgcgcaattatatcagcaccatactggataaattaaagttacgagaccgcacacagctggcagtcttttattataagaactgcggctgagccggcggtacagcaatcgcacagaagctgtgccgacagacagcgacatgaaagagacggcaatgcagcaacagggaagatgaggaaaacaatgatatttgagacacatgcacattatgatgatgaagtatttaatgaggatagagagcaattattagctgggctcccggaaaagggaatcgggagggtgattaacgtcggtgcgtccattgagacgacgaggacgacgctcgcgttggcggaggcgtatgattacatctatgccgccgtgggtgtgcatccgagcgatattgacgggctgaacgaggagacatattcctggctcaaagcgcagacggcacatccgaagacggtagcggtgggagagattggtctggattattactgggacaaggagccggaagtacaggcagcgcagcgggaatggttcgtgcgccagctgacactcgcaggggaaacagatctgccggtaattatccactcgcgtgacgcggcggaggataccatgcggatcttaaaagagaccggaagattccgggaacatcccggtgtcattcactgttactcgtactcgccggagcaggcaaaagagtacgtgaagatgggatactgcattggtgtgggcggtgtggttacctttaaaaatgcaaagaaactcaagcagacggtggagcagatctctctggaacacattctgctggagacggactgcccgtatatggcgcccgagccgcaccggggaacccgcaacgattcctccaacctctcttatgtggctgccaggattgcggagatcaaaggcgtctctgtgcaggaggtggagcagacgacctgggaaaatgcctgccgtgtattcggcgtccggtaggtgtctgcccgaatcagcagaagcgggaatattccggggtgtctgtccaatagcgcttcgggattaactgcatctgcaagcccggatttttgcgggattctatggcaatgtgatcaaaaaaggtcagccagagctgccggaaggcttcctcgtcggaggaataccggctgactttctccagatccagatctgcggcatctgtgagaatgtagctggaaagcactttgtgcaccgcgacagactgatgtgtagcgtcatagatcataaagttctcggagggcagacggtcggtgaaatgctctgccagatagggaaggacgttgtccttcggatggattgtggcaaagagaacgccgttctcaagctcggagaagcgcagaaattcgagatggtggtaggcttcgcggttggtcgcccggcagagctcaaaaatccggtagacacacggttcgcctaaggaaagaagcactttctgaccgtctccgcttgcgagtgcgaggaggatggtctcatagatggcgtctgccttgtccatcttcctgccggaggatggctcgccggacattgcagcctgatagatcgactcatagaactgcatgccgaaacgggacgtgatggtgcggatcaccttgccggtcttatccgcggagggagccacgtgaatatattcggaaaaaagctcgtaattctccggttcgccggtggcaagccggatattgcggtgaccgagccggcttgcgcaggcgtcatagacaccggtaaagataccttcaagactgtcctcacagataaatacatacatgtaaaatacctcttttctatgtgtaatcagggcggtgggctcacagggcaagcccggtgtcaaacagcgacaactgctgataaccggtgttgcggagctccgttggaacttgcgtgtggtctgccatgagatgagagcagatatagtcctcgtcgagcttcgtgcggtacatcatccggccggaacaggtgatgaaatacagggcgcgctttagcacaacgccgatctttttcagatcgtcataggtgagcgcggtatcccgtctggcggcgacgatccgctgggcggacttgtatccgattccgggtacgcgcagaagagtctgataactggcgcggttgatctcgaccggaaatgtgtcgagatgacgcaatgcccagtcacacttgggatccagataaatattaaaattcgggcggtcttccgacagaagttcatccacatgaaagcggtaatagcgcagcagccagtctgcctggtacaggcggtgctcgcgcagcagcggaggtccgccggggagcaccggcagtgacgaatcgccgttgacattgatgaacgcagagtagaaaacgcgcttcagatgaaacttctcatagagtgcctcggacacacgcataatctgatagtcgttctccggggtagcaccgataatcatctgtgtgctctgcccggcgggcacgaacttcggcgccttgcggtagaccatcagttcattctggttctccgtgatgccattctggatctggcgcatgggagagagaatcgtgtgtcttgatttgcagggagcaagctgtttcagcccgtttgccgtgggaagttcaagattgatgctcatgcggtccgcaagaaaccctgccttttcaatcagtgccgggtcagcgccgggaatcgcttttacgtggatgtagccgttgaagtggtggacggtacggagctggtagagcgtctggtaaatcagatccatggtgtaattcggactgatgaggatgccggaacttaagaacagaccctcgatataattgcgccggtagaattccatggtgagcgtgcagatctcatccggggtaaaggaggcgcggggaacgtcggagttgcagttgttctggcagtaggcacagttaaaaatacactcgttggtgaacaggatcttgagcagggagatgcatcttccatctgcagcaaatgcatggcacacgccgggagccagacaattccccatgtgtctgccatctcccctgcggtcggcgccgcttgaggtacatgccacgtcgtacttcgcggcatcggtaaggatggcaagcttctccatgagggagagattctgctgaatgttcatgtgaaagcacctcctgataaaacaaatgttcggttaaagaatagcacatatgttcggcaaaagcaagataaaatcgaatatttgttcgagaaagattatggttcacttggacagtgggtatatggtataatgtacgtaagcaatgagcagtgccagacgtgacagtcacgagatatgcctgcttgcaggctatagcaggctatatatcgcgactgttgcggatgatagggcgaatgcccgttagtccaggaaatctatgatttcctggacgagcactgcgaagacgtgacatttgccgcagcggagtcgtacagatagaagcccccggacgggctttggaatggagaaagatggatacagatatttttgagcagttcccggatcgggaaacatttgacaaatactggaacgagaattatcagccggtgacatatgaggatgtgcgcgaggcgttcaccgattttgtgaagtctgcggacggtcacatctacctctcggattacgaggagaaggggctgatctcccgggaagattttaaggaaaacctctcgcaggaggcacagtttacatttgaggacggactgacggaagttttttacgataagaatccggagctttatgagacggcgtttgcgctctatgaggagtcaaagcttaccggaaagggagacgcatcggtggcgcagacgtttcacgagacgtttcgcgcgctctatgcagagtttctggacagactgtatgatgaggtgctggcagcatggcaacattaggaatcccgcagaatacgattacggttctgcagaagtatcattttaattttcagaaaaagttcggacagaattttctcattgatacccatgtgctcgagcgcattattgaggcggcgggcattacgaaggatgactttgtgctggagatcggaccgggcatcggcacgatgacccagtatctgtgtgaaaatgccagagaggtgacggcggtggagatcgatcagaacctgatcccgattctggcggacacgcttagcgcttatgacaatgtgacggttatcaatgaggacattttgaagctggatattgtaaagctcgcggaggagaagaatgccgggaaaccgatcaaggtggtggcaaatcttccgtattatattaccacgccgattatcatggggctgtttgagagccatgtgccgattgacagcattacgatcatggtgcagaaggaagtcgcagacaggatgcaggtcggaccggggacgaaggattacggtgcgctctcgctggcggtgcagtattatgcaaagccggagattatcgcaaacgtgccgccgaactgctttatgccgcggccgaatgtcggcagcgcggtgataaggctgacgcgtcatgagaccgtgccggtgcaggtggaggatgaaaagctgatgttccggctgatccgggcatcttttaaccagaggcgcaagacgcttgcgaacggtctgaataattcgccggagattcatctctccaaggaagtgattcaggaaagcattgaggagcttggcgtgccggtgaccatccgtggagaggcgcttacattggaacagtttgcggcgctctcgaatattatcggacgcagaatgaagcagcaggcataaagagaacagggggaaacagacaatggatggacaacagaacaatcagagtggatggaacaggaacgagacacccagaacatacggtgaagatacgaaaatgtatcagaaccggcagaacgcgtcgcagcagccgaattacggaaatgtgcaggacatgagtcagcagccgaattacggaaatggtcagaacgcatatcagcagccgaattacggaaatggtcagaacgcatatcagcagccgaattacggaaacggtcagaacccgtatcagcagccgaattacggaaacggccagaacccgtatcagcagccgaattatggaaaatggcaggggaatccctacccgcaggagcagcacggtccggtatccgatgttctgtgtaatattctcctgctgatctttatggcgcagattatcatcaattttgtggtatttggtgcgacatggaacgcgatggcgggggaaggaatagacgcttatctcgacggatccgtgagccttggcagcccggtgcagatgctttccatgttttccaatctgctgtttgtggcgatgcttgtgctgttgattctggatattgtaaaaatcagcaatcagaaatacaagatcaccggtctggtgctgtttgcgattttcttaagaccgggctattacgtctggagagcacatgtgctcaagagaaaaatgacgtttccgatcatctacaccatcgtttacagcggagtgaccgtggcatattttttctattcgttttataaagttttttcactgacattcgggattatgcagagtctgaactagtgccgcggctttgtgggaatggaagatctccttggttcatataataatggacagggagatttttttatgcggaaaaaatggaaacactatattgatagaatgcttacattcgcgctgatcggcatattattgccgctttttatcacgataatatgtcagcgtatgcgactggaggaagtgatatacggcacgtacgacgcgataacggaggcggcagaaagagagggcggggaggaactggaagaacagctgccttttattctggcgaaggagatccgtgcggacgcggaggatgcggcgcttatggcgcagtgcgtgattgcgcggacaacactgtatgatgccgcggcgagaggggaggaacagccggctgctttttcagaggaagaattaaggcaggcgctgggggaaacatatgaaaaggccatggaacggcttgagacgtgcgtggaggagacgagtgggcaggtgctctcctggaacggcggctatgcgtatgctgcatatcatgcgatcagtgcaggaagtacgagagatatgagccggtcggcggaagcggcggtgccatatcttcctgcggtggagtgcccggcggatctgacggcggagggcacgctctcgatcatttattgtgaggaaactgacattttaaagcggtgcggggagcattttgcggaggcagacgtgtccgcggtgtctgagatccaggttacagagcgggatgcggcgggttatgtacagcaggtcatgctgggggagtatgtctgcaccggggaagcgttccgtgaggcgatgggctggaattccgcgtgttttacgatcacgcagatgggggaaaatgtgcggatcgtgacaaggggactgggacacgggtacggcctgagccagaatgaggcgcgcgcgatggcgcaggaaggaacctcttacgaggagattttacaatatttttttccgggaacaacgcttgtgacagcggatcagataaaataggcggcgctctgcataaaccatccgtgcagggggaacaataggaataaaaataaataatatggatggtgaaaaaaatgagaaaaagcagattttgggcattcctcgggcgtaaacaatatgtgattgcgggggcgattgtgattgcggcagcagttgcgaccacggtaatttacagcgatcatgaacaacagcagcgcgaacagctggaggaagaactggcacaggaaaacacaccggaggaagccggacttgtcgctgcgacggaaagtacggaacagacagcacaggcatccgcagttattccgccggagcagaccgcggagacggaaaagctggagcagaaagcggcagagacgacagagagtacggaagtggcgcaggtggaaaaagaagcggagaatgagaccgcagagacgggagcaggggtcaatgcccttcattttgatccggaggacggcatgctctggccgatggagggaaatgtgatcttaaattacagcatggattctaccatatactttgcgacgctggaccagtacaaatacaatccggcggtgattatcgcgggagaggtcaacaataaggtatattccgtcgcaaagggaaaagtcatcggtctctccaacaacgaggagaccggctgtacgatgacggttgacctgggagacggctaccgcgcggtctacggacagttaaaggagccgaactttgcggtgggtgattatgtggaatccggccatgtgctgggctacgtggcagagccgacgaaatattattcggtggagggcagcaatctgtattttgcgctgcaaaaagacggacagcctgtcgatccggtagcattttttcagagctagtttgtaaaaggaagacaccggttcttgaatatgttggatttcttcattataatgaaacaagagataagggaggaatcggtacatggaattcaaggaatacagtaaagctgtgatggcgtgggtggacggagtgatgcagaaccgcggcgccgatgccgagaaaacattgaaatactgtgcagatatcgaacaatatgcaaaacagacgggggatccaaagcttctggggtttgcctactattatgcgggcgagacctactatgtgctcaatgagggcgagcagcttcttaagaccattaccagagctatcacctatctggatcaggcggagcagtgggacatggttgccagggcttataatatccttgcgattgcctttttgaaccgtggaaatacgccgattgcgctggattactatctgaccggactcggttattgtaaaaaatataagctggcgaacgaagaaaacgtcatcaacttgaatctcggaaccctctatctgggcaacgaacagtggaatgaggcgcagagatattttgaaaaagtctcctccgatatcaaggcatatccgaagacaccgaattattacgggctgatgagctgtgtggcggtctgtctggggcggtgctttatgcagcgggaacagaatgagcgcgtgcaggcacagctggattatctggatcaggtctgctgggagcacatgcagaagatcgagcgcctttccgcgctgatttttaaggcggaatattatcaccgcgtgggaagaatcacactccgcgaggaatgtattgagcagatccgcggacttgtggatatggacatggcggttatggatatctttgatgacgtgtacgggctgtgcagactgttgctggagatcgataaggaagacgtcttctgggacatcgtggcggtattggaaaaattgacgaaaaatgccaatattgcaaatctacagcggaaaatagtttccttaaaaatcctctgctatcgcaggaaacaggacgaggcggcttatcttgaggaggcgggccggttctatgagctgaccgaggcgctggatcgggagaaccattatatgattgccaacatgctctccgtgcgcagatcattagaacatgcgaatgagaagcggcgggagatggagaaagcgaatgagcgtctgctggagaagtccgagacggatccgctgacgcggctggcgaaccggttccggctgaatgattatctggagcgtgcgtttgagcggacgcgggatgaccatagagcatttgcggtagagattctcgacatcgactacttcaaggaatacaatgataactacggccatcaggcgggagatgcctgcatcgtggcgattgcggatgagctgcggaaaatgcagagccacgataccttctgtgcgcggtatggcggggatgagtttatcattatttacgagtacaagacggaggacgaggttttttccatggcggacagtctgcgggagcgtattcttgacaggcggatcgagcatgtgtgctcgaaggcgcttccggttgtcacaatctcgcagggaatctgttttgacgtggctccggagggaagccggagctgggatttcctgcatgcggcggatatgatgctctacgaggtgaaaaagcgcagccgcaacaatatttcgctcggacatctggatgcaaaagaggcgagatacggagaagagaggaaatttttatagattccggcatagaatatactgtaacggaaaatccgcaatcgagccttttacttttaccgaagcgcagcagtatgaaaaagtacagatcaagtaaagtacgcatctgtcgattgcttttcataggagtattgcccaaagccgcgagcggatttgggttacatagacagaagttcggagatttgcgcatttcttgacaaaagagagatgccgtgctatgattcaaaatactgcgcagtcggcagaggtgggcactttctgccggtgctgggcatgcgtcagagaattggctctggcgtgacagaaaggaaaaagatggaaacagttagatttgatgagttagatttatatcctcaggtgttaagagcgattgcggatatgggatttgaggaggcaacgccgattcagagccaggcgattccggttgtgatgtcgggcgtggatgtgatcggacaggcacagacaggtaccggtaagacggcatcctttggtattccggtgcttcacaaggtagaaccgaacagcagaaagacgcaggtaatcattctctctccgaccagagagcttgccatccaggtggcggacgagatccgcaaacttgccaagtatatgcacggggtcaaggtgcttccggtgtatggcgggcaggagatcggacgccagatcaaggcgttaaagggcggtgcgcagattatcgtcggaacgccgggacgcgtgatggatcatctgcgccgcaagacgatccgctgtgatgcgatccacacggtggtactcgatgaggcggacgagatgctgaacatgggcttccgcgatgacatcgagacgattcttgagtatattccggcggagggacgtcagacgatccttttctccgcgacgatgccgaagccgattctcgatattaccaggaaatatcagcacgatgcggtcaacatcaaggtggtaaaaaaagagctgacggttccgagcattgagcagtattactacgatgtcaagcgcagcgacaaggtagaagtcttaacgcggcttctcgattactacaatccgaagctctcgctggtattctgcaataccaagcggatggtggacgaacttgcggaagaattaaagggacgcggctattttgcagagggactgcacggagatatgaagcagtcgcagcgtgaccgtgtgatgaagggattccgcagcggcaagaccgagatccttattgcgaccgatgtggcggcgcgtggaatcgacgttgatgatgtggaagccgttttcaactacgacattccgcaggacgatgaatactatgtacaccggatcggcagaacgggacgtgcaggtcggaccggacgcgcttttaccttcgtgaagggcaaagaagtctacaagctgaaggatatcatgcgctactgcaagaccaagatcgtggcaatgccgattccgtcaacggatgatgtggcacagatcaaggcagagaaggtcatggaggagatcggcaggatcatcgacgaggagaacctgtcggacatgatcgacatgatcgagcgccaggtgaatgcttcggattacaccgcaatggatattgcagcggcatttttgaagcaggcactcggccaggtcaatctcgacaacggcagcgacgctgactacgacttcgacaataccggcgcggaggaagggatggtgcgtctctttatcaacatcggtaaaaaagaccgcgtcaagccgggagacattctcggggcgatcgccggggagtccggcatgccaggcaagctggtcggcgcgatcgacatgtatgacaagtatacctttgtggaagtgccgagagagtacggcagagaagtcctcgagggaatgaagaacaccaagatcaaagggcgctctgtcaacatggagccggcaaatcaaagatagatttaataaatggaacgctattggaatctggaacagccgcaataaacatagacctctttggggtgataagtaatattattagaataccagagaacaaaaaagttccagaataaacagacggcgggaaattctttgaagcaaaattcacgtatttcttccatgccgtggctggcatcccattccgtgtcttggccacgtttggacactcacggagtgtgtccgacaagccgcagacaatgagcggactttctggtgtccctaatggcaaacgcgtcgtcccgtctggtttcacatctaccgccgccgtatccaccacataaaccgttatctgcttataatacatacttccggcactatcaacaaccgtcagattctccgtgcagcttccttcatgacgaaactgtgtaaaatctgctgcctggtaatccggaatcgaaaaagatgtcccgttttcgtggaatcccggttcaatcgggcttccgtcctcccgatctgatgcagttgcatgacttaagatctcactatctgttataaagccctgctgtgcctgacttaacgtataataaaggtttaccgccacgatccacgggcaatcatcccacgatgcatacaatgtaatattcgcaccgttctgatccgttatacccagacgatccaccagctccgccaccgtcagctgatcccccgccagatataccggattaaaattctctttttcttcctctgttacccagccggtattcacagacgcatacgctctctggtctgcttccggatctgtctcattatcagcaacttccggctccggatctgcttctacagcttcatcagcttcattttccgcttccgtatctgttgcttcttcattcattccggcatccgcttcatcttccggcgtttccggatctgctgcttccgaatctccatcactttctaaccggatcgccccgctcaatacatcctgtgtcacattctgacggcggtaattctgtatcatctcggtatcattttcggggtttttctgccctgtaagcccgttaaaaaatcctttggtattgcggatagggtacggggcagcccccttgttctgtatgggttcgggtacatttgggggcggtttttatcgctcctgttcctgccttttcacaggcttgcgctcccggtgtaaaatctggtcgatattgcccttgacagtctgtaagcggcggtattcctcccgttttgcccggtaatcgttgtagccgctgtttttctctttgataaggctttcaatctcggcttgcagggctttataacccggcagcttggaaatgccgttttctttgaaatagcgggcggctgcgtctgctataataaagtcgctttcgtgcttctgacggtaggctgcttttgctttggcgtttttctgctgtttcagcccgtcccggacagggcgggtcttggaataggcaagcacctgccgttgcagctccttttttccgttcagcgtcttttccacctgcttcagctctgcaaggctttcctgcatggcggtataggaggcagaacaggcttcgtccagttcctccggggaagaaaagccgtactgctggtaggcggtaacggtagctgccatttgctttagattgtgctttgccgcccagcggtcatagcccacgcccttgccctcggctcgcttggcttcccggtcaaccatgcgctgcaaggtgttgtctgccggggtggtttttgcggctttttcctcccgcaagcgttccttttgggtgtgggggtattcgggtatggctgtggtctgttcggcagctctgcgggcgttctgcgtgagcagggcaaggacagcagccttgtcaaaatcgtcccccagcttccgggctgtgataggctttgtcctgtccggcgtgaggtaggaaagccgcccccggctctccttgacggtcacgccctcccgcagcaaaagggaagaaaactcgtcaaagctggtagcttgggaaagtgcctgccgtatcgtccggcgcagcttcgccttgtccgtttcaaacttggtgggcttggtcgtctgtccggcggcttctctggcggcgttctctttatcaagggcaagctgccctttctttgccgcccagtattcccgttctgttatccgttccttgctgccgttcaagaggtcgatttggtaaagcccctcccggtggcacatctccatgacttcgctcttgaaatattccatagcggcgttggtacagcggtgcttgcagccctcccttgtgtcggctggtctgtccatgtagggcagaagcgggacttcgtaaatccgcagggagttgatgacgatatgcacatggatattgccgctgtggttatgcccgtccgggtgggtgcatacaagggcttggtgtccggggaaatgctctttgcagaacttctcgcccagctcctgcgcccggtctacggtcaagccgttgtctgttccgtcccgtgggtcaaagctgatgatatagtggtggcttttcacatcttcccgtttttgatttttctcatggcggagattggctcgcatacaggcaacggcgaaatcctcgcccccgcagttaagggaagaaatgcggtaatcctccctcggtatcagccgcccgttttcatcaagggtgggcttcatggtaaactcgtcatgctcaaatgtgaggtaggcttccgctgcgccatagtccgcatttttagagctgatatgtttgaatgttgccaacagcgtcacctactttctgcaagacttcaaactttagggcagcaaggtcagaaaccgccgcccgtacctccccggcaagctgcgggtaggggctgtgccactcgttcagcgtccgggctatctggtttaagttgccgctgatcctgccgtattcggcggtcagcttcccgacagcggcaagcagctcgtcgttgacgggggaaacggttatgatggggcgtatggctgccccggttatggcttgccggataaattcggcttggctcatgttgcaggcagaaagcctttccgcaaactcggcgtattcttcctcggtcatgcgtgtcttgactacccggctgcggtgcggcgtgttgtatcgttttcgcatggtaaaacctcctttctgtgcgtggtgtcctctcactaataggagaaaaacggggtgtgaagcggaactgtttttgaaaaatccgaaaaaatattttgagggatttttaagcggcgcaagccgcataagcagggtttggggaaggcactccccaacaagattcccgcaggggcaaaatgagcgaaaagcgaattttggtactgcggtagaatcttgctctaaaaaactaccgctttcctcgctctaaaaaactaccgctttcctcggcggctctggtttgcggatatactggcttgctccaccaatatagcgattgcggcggcgtgttctgcccgctgttcaccactacaacggtgaaaagggggcgttttggcaaacgcagcgaaattttttttattttccctgtctgctccctacaacaatccggcggtgtggtttgccaaagatttttgaaaatgggcgcaaaaaaagcagtaaaccttttcaagatttactgcttatctgccgctgtgatgggcggcggtattaaattgtcagccgtttttcaaatggaatttatctgcaatcgctttctttccgctttccaattccttttctgtaatcttccataatcctaacgcaatgatctgctatcttttgcattccgagttcttcaaaaaaggcaatttgtattttcatcagttcttcacaaacagtcaacttctgctcatccatattgctaatagcaagccatgggaacgctttatatttcttagtgtccccaatgagaaaattgtaccctatcaactcattttcacggaaaacgaaatagaattgtgggcctgaacctggaactgacttttccataatttgctgcattgttctcacgccgccgtatgccggaaaaaaacctattcgctcaagagcatttaatatgtcaatccttttatctgtgggtatgtctctataattgataatctgttccatttgctctaccctcattgaagtttaatttgtcaggctctaattatacaacttttctgtttagcggtcaaagcggaacttcaacaggctttctatcagttgcctgacgatatgctcctgcatatccgtgttaatctgtccgtccattttcgcacaagagcggacatatcccgcataatgggataggacggcggcaacagcttccgggtcgccctcgcttgccttaacgattgtctcatagggaagtagctggctcataggacaaaccctccaactctgcccgtagccgccgtaaaatcatctgaatacgccgcccggttgtgttgccagcccgtccatatctccgtccaatctccctatgcgtcaatcgttggaagtagtacaagaaaatgatttcctgttccatctgtgatagtgcggacagggctgcggcaagctctggactttccaaaagcaccatctgaccacagacgaaaagcggatagctggtcatgccggattgctccgcaaagtatttatctgtggtactgaatggatagtgtttttcttctatcagatattcaagcgagatttcccgcttgcggcggctccgtatgctccgggctgcgtctatggcagcgtggcgaataacagtcttgcaaaaggcatcgtgtgtatgccggatatgttcttgatacttttcgtgttcggtcatggaaaatccccctttctgaataatggcagagggcggcagcatcttgtgctgtcgccctcttgattaccgaacagcaaagacgggcggggctgtcaacggcggcgcatttgcgccgttcatcttgaccgttgacaggctcggctgggtttgctatctgctcacggcaattcactctcattgataggaattgcctcaagttccgtattcaaattgttccaataagagccgatatccgcacttgtgaaatacttaaaaccgcctgctgctgacttcaattcgccgtttttaaccccatagcaggcgtaaatcaaatcgtagcttgttccatctgagaggttaaatctaaagctggtcacatctgctccggcagtttcctcagtcgttttgtcttttagggataagcccttgaacttatcatacagggtctttatatcattttcagcaacaactactttcttttctgctgatgcaggcactccgtcatagtggtacatttcaacgttttcgacatcttcaacctcaaatgggaagtcgattttgacaggctcataagcaatgtttataggtaacagaaagagagctgtaaaaattgcaatgatacaaagagcgatggaaacgagaacagcaatcgttatcttttttctgcctctctgcttttcttttgcctcatggcgcataataacgctttcgctttcttcgtgaagaacatcttcgctcgtgtgagaaagcaatttctgataaattgcgttacagtcagcacaggcgttcaaatgctcttttaccatctctgcgcttgcttcgctgcaagcaccgtcaacatacagcggaagaatatctcgaacaatatcgcattgtttactcatgcttttcatccatcctttcttgaatttttagctttgcacgatgataagtaactctcgcccatgattctgtttttccaaaaattgcagcgatttgtgaaaaagatagttccccgaatacgcgaagctgaaagacttctttgtatggttcttccaaacggtgaagaacgaggtgtatgcggaacgccatgtcagaatctgcaactgagttctcaacattttcatttgatggcaagtcattgattttactcacatcagctactcgctgacggcttcgcatttcatcatggtaaaggttttttgctatggagcagagccatgtcaattcatctgacttacctttgaattgtgatgttgtagaaacagccttatagaatgtgttctgcgtgatttcctctgctatctcacgatttttggcaagagaaatagtatacgagtatacctgtaaatagtaggctttatagagcttttcatagtccatacttgtcatcacctccttcagcttcataggttagacggagaaatcggaatttcgttacaaagaagtttgaaatttttatacctttacgctactcttgctttgtgcggactattggtagacgcgcattaacggcaagtaaagagattgctgtgtcagcttgatatgttcaaatgctaattaagtatagcatacagctatgaatttttctattgcgttcccctgacttcggaatagtggcagggctggctatccttgttttgctttgtgcttctctaccgtacatgagcattggaggcagggttgtcggctccgtaaccttccaagaggttgacgataccccatgcgccgaggccgcagccgatagccataacgagaaccttcagagtgtcaacagcagaagcgaaaaattccatatacatttcctccatttgataaaagattgaattgtgggtatcaaaaaaccgccctttcaggcggtctccggcctcgggccaacttggcccgaagtccatctatcagttaaacgaaatcgtctgcgctgtccaaatcatcataattgagaatgtcagcgtcctcgtcggaggtgtccacctcatacaccgtgtattcttcctcgggctttagtctcaatcgccgggaagtcaggcgttccagatggaaggcgttccgtttactgtcatgttccgctgtgtagcggtagttggggtgctgcttcaaatcatacttgggtgaaaagaatgggggcaggccccgaagctgtaacaggcacttgtttccgggcatggtggtgatctcgctggttgtcaaaagctcccggcccaaacgctgggtattaagtccatagctttcggactgcccccgtgtgcggctgtctgtctgcatggagatcgtcgcttttcccagccagttttccgaaatgtcctttagcgtggaagcctcccggcctcccagaaacacaatgctgtccatattgcccatgatggtttccgcatggtctttataaagggccttgcattggctcatggcctgatagaacagggtcaggctgatttctcttgaccgaataacggccacgattttctccagccccggcacctgcccggtattggccgcctcgtcccacagcacacgaacatgatggggcaggcggccaccatatttgttgtcggccctctcgcacagaagattaaacatctgtgaaaatgcaagggccacgataaagttataggtactgtccgtatcgcttatcaggaagaacagggccgttttcttgtccccgagcttatcaagctccaactcgtcatagctcataatctcccggagctccgctatatcaaacggggcaagccttgcgccgcaggaaatcagtatgcttttggcagttttgccagagacgaaaagtcaaggactttttcatcaaattcaaaaagaagtcacattttgcggacttcctcacggagcagacgcttgattttgtcctccattgtctcttttgcggtctggctgaaatgcacacggacgatataggttgtcttgccgatctgctttctgacagtcgggcaagtggcggtgttggttgcggtattgttcattcaaaatcctcctgtaaatgaaaaatgcccggtgactgttcatcatcgggcggtgtcggtatgagggaacaaggcaaggcggcaacattaaggtatctataaaaaccttgccgtctttgccacgcttgccgtgttcctgttgtcaatctcggagatagcagacccatgctgtgccgtctttctcggtcacaagtctgtccccgatacggctctttgccgttctcatggtgcgtgaggaaatcccacgctcattgactgccttttccagctctgcgctcggcatacgctttccatctgccagcagttccagaatgagcatttgcgcctgtgcggtcttgctttcggtcttggcggtgtctgtcccggcaagaagctcgtcagcggtaatgtcataagctcctatccattcaaagcctttctcgtctcccagagaaaaggcaagggactgtccgggcggcgcaagggagcttttctcatggataagcaccctcgttgtggggctgtccttcagcttgccgataaaaagcagactgcggactgccgccgtaatgtcgatagaccccaatccccggtaggtgctttgcgttcctgcggctttgttgaggtgtccgatcagcacgatagcgcacccggtagcctgtgcaatgtctcccagactgcggaagatgggacggacttcatttgcccggttcatgtccacatctgcgcccagaaacgcctgcaccgggtcaatgataaccagccttgcgttgttctcacggattgcccttgctatgcgctcatcggcaagggtcagcggcgtgtctctatcgtcaatgacaagtactctttcaaggtctgcgtccgcttccatcagccggggcttaacggtatcgcccagaccgtcctcggcggtctgatagatgatattgaaaggctcaagtgtctccataccgggtaaaggctttcgattggtgcaagccgccgcaaggcgcatagcaaagtaggtcttgccctcgccggggttgccctgtatgatggtcagctttccaaatgggatatacggaaaccatagccaatccacgctcgtcagctccacatctgccatacggagcattgggacaggctgggcggtgggcagctctcgcagcgtgattgtctcggctatgaatttgcggctgggaatgtccccttgctgacggagaacatcgttccagtctttccttgccgggacaaggcgaatgacggcgatctcgctgggaatgtcctgcgccagtcggaagcaggcttcacctcctgcggtgtcgctgtcaaggcagaggaatacttttcgggtgtccttgcgttcagaaagaaaacggtcaagggctttgcccgaaacgccgcccagggcaagataatttcttgtctgccaatcctgcggataaaggcagataaaggacaaaaggtcaatcggcgcttcaaaaacaaaaagctggttgccgtttccctcatagcggaacggataggacttgtcagacccggtaatatcctgtctgaatgggtctgccgttcctcgcacatgggcgtatcttggcgtaccgcttcggtctctgccaacaaagacaacattgtgccgctttgcgtcctcgtaaatatccccggaaagaagaaaagcctcaacaagcgttttgttgagacctcggctttcgcaaagatattgaattgctctatcggctgttcggttgtgcaagggcaagtgaaacgctgtgggcggtgctgtggtggcttcggtctgtccctcggcgctttcgccggttaagagctggactgcttcgggaaaggacttgccgtaaaactccatgacgaaatcaatgggatagccgcccttgctctggctgtggcgaaaccacttgtttccccgaacggtcaggctgtcatgttctttccagcggtattcccgtccgcttttgataagcgtctctccctgtgtacggagaaaatcttccagactgacggcgtttgcccggtcaatctgtgcttgggtgtactgcatggggtgtcctcctttactcattgtcatttggggacggcagatagcctaattcctgcaacatttcaatctgctggtcggtaagggtggcttcaaaggcaagctcctttcgggtgcgctcgtccagctcgataaggtcggaaagaggtctgccatcggtcaaggggtctccgcttaacaggcgtttcgccattctgcggacggggtttttctcgcttttccaatcgtgataattcatagggatatatcctcctttttgtgtcgtgtttggggtcgattttggagcttttgttcctctgtacgctcgttaaatcgggcggcagtatctacgcatgacctgaccttccaaagacggtgtaaatcgtctctgacggtcttaaactcgccgtaggtggtgtcatgtgcctgttccaactcgtcatactctgcggacagctttttcacatccactttaccgtctgggaactccccggtcagctttcgtctggcggcgtagaactgtttcagttccgcttcatgctctgccttgtacttggctctgggcttctcaaacttgattttctgcaagccgtcatagacaggcttcaagctctggaaagcagcggagctgtcatagagctgcttaattgctttcattcgggcggtctgttcgtccagcgttttcttcaagctctctgtggcagcactgtgttcgctgacacggctttccaaatcttcaagagtgtaaatgccgtttgcccggagataattgaaagtctcgttcatctcctttaggttgctgaccttgcctttctgcgaatatgccccggctctgcgcttggtgtaataggcgttcagcagagaaacaaggtcgggtgcctgcggcttggcaagctccgcttttgcttcggcaatccaatcaaacaggagagcgattttcttcttgatgtcccggataacggcattggttgctctgatccagcggttgaactcgcctttctcggtgcgtatgcctttcttctccattgcccggacggttgcgccctcatggacggtgggaagaagctccacgccctgacgctcatagcttcggtggtcgatacgaacgtcaagccccttttccgcaaacttggcgttgcatagctccgcccatgtctgccgccagtattccagcgtttcgggactgccccagtcggtagtgggaacggcgttgaaaataaactcgccgttctggtctcggatacggttgccgtcctcgtccagctcgtacacccggcgttgctttagcccccatttgccgtcctgcttaatgggacggatagggcaaagcacatggaagtgtgggtttggtatgccgccgtcctcccggtctggctggtgtacggcgaagtcaaccaccatgccacggctcacaaagttctccaacaaaaattgccttgcaagagcgatgttttcctcaagggaaaattcattctgcaaggcaatgtcaaagctgtatgcaagctgggcgttctttccacgctcggctttttccacggcgttccatagggtctggcggtctgcgtattctggcggtgcatgggacggcaggagaatatcggagcagatcacgccgcccttgcgggtgtagtcgctgtattcgccgtaatactcgctatacaatcgctccccggcacggtaggcggcagaagcgatagcggactgtcctgcgcttcgcttagtctgcgtgacgctcagatgaaatagtgccatcggctttcaactccttttctctgtttgcttggctgatatgggtaatcgccatgtgacggacggctcgctggacttcggacagggaaaagatgtgttccatcagctctgtcatttcggtgcgtgtgagatctttgacctccggggcaaggctctcaatcgtgccgcccagattgcaaagacgatgggtgcgtttctgcctttcgcctttctccagatatttctttctgttctcaagacggttgagcttgtgcttctcctgtgcaagctgcgtctcggctcgttccttttcggctcggagctgttcaagggttttcggttttgtcattgtgattgacctccttttttgatttttgggataaaaaaagaccgtcaacttttcgcatagtgcgaccagtcaacggtcagtttttcggtattcagtttttcaaacttgctggcggcgaacagcattttatgctgtttgcggacggcaagtccacaagggatagccgctttagcggcgcaagggggtgtagccaccttgacggaacgaagtgacgcaacattctcggtcaagcagttttcttctgctgacggagaatgaagctccgcaggacgcacgatactcccgataggagagtatagaagtgcgccctttagttcctaaagggattttcttctgacccaaattatataaaatgtagatcaagacatttctaagaggtactctcagattttcacaacataaggttcatcttcaataataccctgatcgtgggtaacaatgataaccgttttaccttcttcattgagttcgtgcaataacctcataacaatatctctatttttcttgtcaagtgagccagtaggttcatctgccaaaacaacagaacattttttcatcataagacgagctaaagcaactctctgttgttcaccaccggaaagctgataaacttttttgttaacttcctttgataaccccacacgattaagagcttctttaagtgatactttagttcggcttgattttttaatcaaacttaaattttctttaactgtcttattttcaagcagtgcaaaattctgaaaaagaaaccccactgtatccgcaaaaaaactgtttttatttttaagccgggtaatattcagcccttcgattatgatactgccgctatccggtttttcgataccaccaatcatattgagtaaagtgctttttccactgccgctatcgccgctgattactacaaaacttccatccggaatttctaaattaaagttagagaaaattattttctctccaaatgctttatttaagccacgaattataatcataaacatcctcccttcaatgactttgagatatttgttttttcaacccacataatatttgtgaaaatgattgccatttcaataatggtgagcaacgctccaatcagtaaagcaatcccgacacttgcgttagatataaaaatcgaaacaatgcaaatcaatatcacaacggctatattttctaagagattaacggaaataaatcttttgtgcctttcataaaagcgatagcccaaaacctttttgagggagatttccatcgcattaagtctaaattccattttcacttcagatatgatgatagcgatatctaacagcaatactaatacgcaaagagagcttataaagccaatcagtttcacgaggaaactatgactataaatgtaatcctctccgacattcgtcagcataaaatagtgtgaaccaagctgttctgaatattttttcgcaacactgcgaattgtgctttcatcgcatccgtagattacctcaccattatatgttcctgtttcgatataacttccatttaaagcaacagcctcatttgcctgataaatcacaatcggatttgttactcttgacaatccgtcaatagcctcttctctgttcgaattgagataataaaattgttctctgccagaatattctttataaacaacacgcagttcttctgcattttgggtaagagagccaatttcctcttttgcgatatctttgtatgattccgcatttcttccctttggcacgaagaccacgatatcctctttttcatcatcttcagtaagcatatcagaaaacccttgtagcatatctctggcattatgatttacaaaaatataattatccgtatcgcttatccggctgcctatgcagaccaccggatttatcgtgttgtattcattttcgtaaaggtcattccaaaatttgctctctttggattcctcctcattttcttcaaaaggaggttcaatctgcataactccaaaataataatcattataatgattttctaaaagagtagtgtttgtaagtaaattaccttgaatgctactgagatttgtagttattgtaaaaattgtcatggcagtagcaaatactttaagaccgttcagaagataaaacataccttttttatctgaagcattggcaaaggctttttttacatcaaagcggacaaaagcagcataaggaattacggaaagaactgctccggcacaatacactgccaaaatgagatgatcttcatacgctcccgatataaattgagaaacaagcaactttgctaagacgaataatgcagcatatgaaatcatatcagccactacagcttttagagcaatcacagcagcattttcgcccagagaagctcgtacaactacttccttttgcctgcgtatcacctcaatcatattaagtacaatcatcaatatggcaaccaggccccaaacaatgaacatcatatcagtttcggttgattgccaaaactctggctgcgatatagaatattcttttgccaaatcttgatatgtggcaataatgtcatcatcatcaccgatatagctgaccattatttcctgtccattgcctgtgttttttgcttctctaaaatcttcaaattctattacggtgattccacctatcaaagccgtatatgttttttcctcaatatccattgtgcttttaagactatcccgaacaacggtatcatcaccataaatataaagtcttgtctgataattagaaactctctgattaaaagtcgaaaaaatatgaacaccatgcttctcagctgtatcttctgcattggctaaaaatgaatccatatcgtcattagtagttgtgtatctggacgataaataataagcaccattaaagttccagagcatattttgatatacttcagcttgcataacaaaagcaaaaataatcgtaatcaacagcaatatatttcttatatgtttcatttgaaattcttaaacctcctttgaataggtaacagacacacgattgcccaaaatactaatatggattttttcatacaaccacattctcttgttagattctaattttccgttttctttattcgcataaattgtaccataaaactcgtgaacaattctaccacaactttggactacatgagaaaagtccgaacagttttctgcccggacttcctcgctcaatcataaatcaattccgctttcacaatctcctctgcctgtgccttgcaagcgttcatctgccgcacccattccatttggtttttggcttttagttgctcggtcacgccgttttgctctgccagtgaccgcacgatcagctccatgcggtttcgtgccgcttcgtcaatctcggcgcaatgctcaaagagcttgtcggatagcaccagctcattgaacagtatcggacggtgcatttccagatacgccttgcgaagtctgccgtagtgtccgaggggcttggtcttgcggataacgatgttcgggataagataatcgccgttctgtgtataagtgatattcatgctgtttgtactcctttcatcggctctctctgcggtaaactgctgacagggacgaacactccctttgcaatatcctccgcacgaatagcggctttcttggcttcgatttctgccttttttctccccttgattttgtcctcgtatcgcttctgcgctccgctggctttacgcttcaagtagttctgatgaagcctgtccttgcgttcctcacgtttgcggatttcctctaattcttccggggtcagctccacttctccaaacgccgggggaacaaatcgcccgacaaaattgaagtaaatctcgacctcctgtgtggtctgtatactgcctttgcggtcacgctcatgcacaaggattttctcgataaactcgttgagcatagcaatggtcagcttgtcgaagttctcgtatttgtcaatcagagcgataaaacggtcagcgtccttttcgtgcttctcgtagctcttgactgccttttccagagcagagatttcagcggtaagctcggtctgctccttttcgtattgagcgtccagagtggcgtatctgctgtcggacagctttcctaaaatgttgtcctcatagattttacagagcaggacttccagctccgacactctctgctttgcggtggcaaggcgtatccgctgtttcttaacctctgctgtctgctggctggactgcgcttcctgcaccacacggacaaactcggctcggtcatgcttcgcatactcggcaatggctttgagcatttcagagacaagggacagtaccacatcttcattgatacggtgctgggtcttgcagagctttccaactgggactttgctgtattgggaacaggtatattgagaaatacgcttgccgttgttggtacggtggacatacatcttgccgccgcaatcggcacaataaagcaagcctgtgaggggagctgcttcgccccagccgtccgggtagcgtctgacattcccacggattttctgcacaaggtcaaaggtctgctggtcaatgataggctcatgggtattctcgaaaattgtccattcgtcctccgggacataatggcttttcttgtccttgaagtgctttcgggtcttgaaattgatggtgtgtcccagatattcacgcttttcaagaatgttgcagatggtggaagaaccccagccgtacacatctttgaaagtcttgtttttgttcacgccctcgccgtgttgggcaaggtaagcagacggaataagcaccttttccgatttcagtttgctggcgatctgatacggaccgtagccgtcaatcgtcatggcaaagatgcgcttgaccacatcagcggcttcgggggcaaccaaccattggtctctggcttcgttccagagatagccgtaaatgaccgtgcctgtgaggtgcttgccggacttgccttttgactggaaagtggaacggattttacggctggtgtctctggcgtaatactcgttcataatgttgcggaaaggggtaaaatcatcgtcccctttggcactgtccacgccgtcattgatggcgataaggcgaacgccacgctgacgcaggatttccataatctgaccgactttcagatagtcacgccccatgcggctcatgtccttgatacacaggtactccacattcccggcttccacttctttcatcattgctaaaaatccgggacggtcaaagcaagtaccactaatgccatcgtccgtgaaatggacaatgtttgtaaagccctgccgggcggcgaactcctccaacatagccttttgattggaaatggaattgctctcacgctgttggtcatcatctttgccaaagtcatcacggctcagtcgttcgtacagagcagtgattttctcgttttttctcataacttgcgctcctttcttcggttttaggttgtgtgttctaagagacttcccaaccgcttgattaagaagtcttttagagcatacaacaccgctggctaatttgtattttttatactgccttacggcgaagtgctggggattccttttttccagcccgtcaaacatatagtctacggcgttcttaaaggtttcatcgtcctcccggacttccatgctgtttatcatttccaccagtgtatttaagctccgttcttcctccggcccctcaaacacgatataggaaacaagggcacaatacagaagcgtttcggctttggtccagaactcgtccccctccttgccgtcccctttggtgttggcgatcagggcgttgacgaacttcaaaacatcgctttccgtcttgatataggccatggggttgtagtgcattgattttgaaaaatcaatgctgttgaacaccttgaccttgtagcccttcttcttttgcagaaaatagccgcattgggagagtgtgccgccctttgggtctaccaccacataggaagaatgagcctgcaaaagctggggcgtgagccagaagcgggtcttgcccgagcctgacgagccgatgacgcaggcgttcagattgcgggcgttggccgggattttgggtcgggtgttcatggtcaagaactccgtcccggtcaggatgacattgttttcaaacttggggtcaacaaagggctttatatctgcctctgtaccccagcgggccgagccatattccatatcccggcgaaatttccgggcctttttgattttggactgtagcacgaaatacagtatcacggccccagctacgcctacggcaaggtcaaggaggcccagccccggtgcatagctctgaaataccgggccgatggtcttgaccataccgaacagcttttctccgaggttggctcccgccgccatgcggtaggctgtgccgcacttggagaaaaaccaaaatgctatgagataagggaaacatggaagtacatatttcttgattttattgattttcttacttaccgttcctccttcaccgcctctctgacctgttctttctgctttggccttgccgcaatctgctctacgaattgtcgaagctgaccgaggatagatggcctgtcctgactgcggcccatgaccttttccgtatatttgccgaaagccgcttgaatggcgtcggcctgatccgccttgaaaaacagcagatagtggccggggccggtcttgtggaaagcgtagtccacatggaactccttgacgatacggtcaaaatccttgggagcccccacatatttcatggcgtttttaccgccgtggtggttcatcagtttccgcacgctctgccgccccttgggccgtttggcggcttcttgctgttttgcaatttccgaaaatacctttttgcaggccgcagccagcaccttacccgagagcttggccgctttcacggatatagcgattgtccgttcttctacatattcctgcatactgcctcctttcctccgagtggatcaaaaaccggacgcctcggaacatcgccctgaagggggaacctcgggccaagttggctcgaggtctaccgttcctcatgggaaggccccgccttctccttgtgaggagtaggtggggcctccttaaactgcttgattgccgccagaatagaatgggtttcctccttctcgtcccgggcgtggactttggaaatacggtactcgtctggaatatcgtccagcccggtatagtgctccacaaagttactccgattatccgccacatagccaccgggagcgaagtggccgccgtcattgatacgaatatcccgcccgtatgcttcatagtcgatgtagtcaatcaggtgttcaggcacctgcatagcctcaaaatcctgaatatacatacggcccagttcttcttcgctgttgacatcggagtaaaaatcgaagcagtcaaggttctgtgtcaggttgattaagtccttgacgctgcttgtgtactccccagcatccatgaccgcctccagcttttccagctcggccggggtcatttcttccagaagatgtgctaagtaattgagctcgtcaaggctttcatattccccgagatggtcagtcagctccagaatatcgctgtcatagtcggtaatgaaatactcctcatactgttttccgtctataccaatccgggaaaagagggcctgcacttcctcaacagtcgtaggaaattttagatattccccagccccggcccctcgctccgggtagagccccagattggtcacataggcttcaaacatcgtggcggccctgctggttgactgtcaggataccgtcaagggtagtggccgtgatgttcagccgcttggctacggcaatatcgtttttcacatcctcgtccacctcgtcaccgcagaccacaagtacatgagagcggcgcagcatatcccggcgcatatcaatcccgtttttgtgttcctccgggatagcgtcgttgatgaacagtggcagataaagaatagggcaaataggagaaaagcccgcctcgtatgccatgcggcaatagcgggcggccagctccatatcggtatcaggatcgccgcaccatgcggcggtaatatacgctaaaggtcttttcatggttttgtacctccgtttctacatattaaaaagagccagacagaggagcccaacccctccgccccttcccgtgggaaggggaacggctcaaaggaatatatatccccgtcgcttgccgcctgaaagcataaccgggagaaatccgtcaaggatgcctttggcaccgcccatggcggctttggcccttgactgattttcccggatatgctacctgaaaaccggcgacggggaatatttaatatcctttgagcttcggggtgcggggcagagccccgcatactgcctcgggccaagttgacccgaagaagcgtcacttttcctgctgggcggcctttttctccggcttggccacttccttctgctggcccttccagtcatccaacagcttgataatctggtctttcatttccctcggagtggtttccttcccgaagtatttgcccagttctgcaccagttaaaatcactttgtctacctcctttttatcctccatcataattccgtcgatcacatcgccattcagaacgcccttctggtcaagctccctcatgcgctgggcctgcgagagcgaaggggccgactgctggccttcaatggcaacggcgatatacctctgattcttgggcttgatataagccagctccaccgccggggtaaatttgatttgcccggcgtccatcattttctgcaaatcaggaacaagatcattgagcttgatataccgctgtacctgtttgacagtcattttgttgcgctcggccacgatctcattggagcgccgtccagcgtccttcgggtcaagttggcccgaagtggcctccttggctccttggtgcttgatggcctccaactgcattttcagggccttggcccgttcactcggcaggatattctcacgctgattggtattatcctccaccatctgcgtgatggcctgttcgtctgtcaagtcacggacgatacaaggcatatccacgaagcccgcaagttcgctggccttctggcggcggtggcccgacacgatttcatacccgccgtcctcacggggacggacgatagcgggctgagtcacgcccttatcccggacactggacaccatggccttcatttcctcgtcattacggacttggaagggatgatttttgaaggcgtggagttcggacagcttgatataaacaatctgttcctccttgcccgggcgtggagcctcggcgggagccgcaggtgtttcagcctgaacgggagcctttacctccggtgcacccttagcgggactgggagccttgggggctttctctgtcttttcggagggagcggccttttccgtttttcccggctgtgcagatttctgtactgccttatccttcttgctgggcgcttctttctgtgcgggagcggcagccttgtacttgtcggccttgggcggtcggccccggcgcttcggtgcctgttcttgctctttggacttttcctgcttcggcccgtcctccttggtcggcgtaggggaagtccttttgtccggggcctttgcctcctgctgggcggcggcccgctccgtggccttcttctcggccatgatttcagagaagttaaagaccgacacgctggcggccttttgctccttgggagcgtctgcggccttgtcctgtgctggagcctcctgtgcgggagcttcggccttatccggggttggagcctcgggagcggactgctcctgcttggaaacctgtgcgtccacttcgggctgggccggggcagggccagagctcggcccggttgcgtcagttacgatttttgctttttcatcggccattcgcatttcctccttcttatttgatggcatgaaaaaagggcctgaccgttttcagtcaagcccagatgatagggatacctcctttccctgcccatgaaaaaaccgccctgtgtctcgatagggcggtaaattcagtaggttggcagtccatttttagttgtttttatatgtatccctttgtaaaccgacgcaagagtaatcagatgatatttatgacatatcattcgtctttaatgtcaccacttacatatttacgcttatttacacatgtatttggacatgatgggtggcaacactttatagggaatatggcatatatcttattgctaggtcctatgcttgaggaaaaacatggaccaatgaaaattatagaggtaatagcagttactgctctggtgacgggcgttattaattatgttttcttttggaatacggcattatgtggtgctagcggggttgtatttgcatttattttaatggtttcatttactagctttcgagaaggagagataccaatcactttcatacttgtagctgtcatttatttgggacagcagatatatgatggagttgttctggatgataacatttctaacatggcgcatgtagtgggcggcatcgtaggaggaattttaggattttcactaaataagagatcaaagtatggaatttgaaaagaaggtgtgagatatgagaatagtaaacaattatgaatataattctattgaattatactttgatggagaaccagatgaaatgacaagagagacacttaaaatgtttaaatggagatggaatcctaagaaattttgttggtataacaaaaataccgcagagaataaggcgttggctgaatcattgaataaaagcaccgatgaaatgaaggataagaagattccagaatcatattcagaaaaatatgagaagaaagaaacagaatcatcaatggatattaagtcattcgtggatagtttatttaaagcaagtgatgaagaagaaaaaatgacattgaaagtgactacgcaggcggataagaaagtgaaaaaggtgtcaaaaaaggttattgatatagacgatgataattttgagctggatctatagtagaggctttgcatgaagaaaaaaatattaatcatagcatctctatgtatgattgcacttggagcaatgattatcagtgataaaatttacaagtctactgatatgacaggaaatgtattggaagatgctttgattccggagtattctggtaaagaaactgtacctatcaatggaaataaaccgttttggtcagcagaggaatatacgacaaaatcgtttgaagtttatagcaaattagatgaattgggaagatgtggtgtagcgtacgcaaatatcagtattgagacgatgccaactgaagaaagaggtgaaatcggaatgattaagcctactggatggcacacagtcaaatatccggaagtgatagaagatcgatatttatacaaccgttgtcatctcataggatatcagctcgcaggtgagaatgctaatgaaaagaatttaattacaggaactagatatctaaatgttgaaggaatgcttccttatgaaaatgaagttgcgtcatacgtgaaaaagacaggtaatcatgtaatgtatagagtgactccatatttcaagggcaataatcttatggctgatggcgttcttatggaggcatattctgttgaagattctggtgctggtgtatgtttttgtatatatgcctataatgtgcagccaggtattgatattgattactcaacgggagatagtaaaaaagttaaatgaaaagtctaatcccccagctatgctggggagaatggaatagttggaaacggtgaggataaaaaagaaaaacctcctgtggtatattgagaatggtgtcgcaagccaaactcaatataccacaggaggtgatccaagtggacaataaaagcatatcacacactagatggaaatgccaatatcacatcgttttcattccaaaatatcggaaaaaggtattgtatgggaaggtaagagaggatgtacgtgaaatcttaaatacactatgcaaatataaaaatgtagaaataattgcaggagcagtttgtgtagatcatgtgcatttaagtgtcgcaataccaccgaaattaagtgtctcagattttatgggatatttaaagggtaaaagtaccctaatgctatacgatcgtcacccagagttacagagtaagtgggataaagcattttgggcaagaggatattatgtggaaacaatcggtaatatcacagacgaggcagtacagaagtatataaaagaacaagcagaagaatcgagaaagcgattgacgagatggaaggctatagcgaaatcatcaaggagaatattgagtatgacagccttcttctggctcatccatatgaccaggagatggtggagggaatttttgacctgattctggagacagttttgtctaaaaatggagagattaccatcgcaggagatgtgtatgcaaagaatcttgtgaaaagcaaattcctgaagcttaattattctcatgtggagtatgcaattaattgccttggaaagaatactactaaggtgcggaatataaaaagttatttacttgccagcttgttcaatgcaggaagtaccataagcagttattatagggctgaggtaaatcatgatatgccacaatatgctgggtaatcgcgcaacgagaataccatgtgtggttggtgcaaattctgcatcatccattgtaaaagtttaaaaatgcgacaaatcaacaactgtacaaaccattttgaaataaaattaaacttgactttgttggaaactggtattatattaggtttataaaagtgacaaattagtttacatataacccaagttgatttataaaacatggaggtgttgattttgaatctgtattttgaactattgaaaactccagtatttactgtggaagatgtaaataaatattatgacaatatggacagcgctcgctctgcaatcaagcgattgatgaaggagggaatggtggcgaaaatccgtaacaatatgtatacctgcatcagtggagagacaggggcgccggttgctaatcgatttcagatagcaagcaagattacgccaacctcttatgtgtctcaccataccgctatggaatattatgggataaccgatcaggtatattacgatgtctatgttgcatcagaaaccagctttcgagagtttgaatttgatggatatacgtatcgatatgtggcgtcaaaggatatggaaggcgtggaaacgcctgcactaagtagtggaatacgtatcacaaatcgggaacgaactttggtagactgcgtaaaggatatggataaaatagctggaatagaagaagtgatacaggatattggaagtatgaagcgaatgcaagagaaaagagtcttgaaatatttagacctattatcgaatcagttcctataccaaaagatgggatttcttctttctgagtataaggagaagatggggctttcagatgaattctttgatacatgtaagagtcagattggaaagagtaagcgttacctgacgaaggacatgtcgagtggacgatatgttgatgaatggaagcttgtgataccagagaatatttacaatatgaaaaatggggtgatagaagatgccacaatataatagagcagaacttggacgaatggccacagaaagtggttttgtgagggatacttttgaaaaggtgcttcgattgaaggaaatattaaaatttctgaatgaggacaagtccttaagagagcatttactcttgaagggcggaacagcaattaatttaactgtatttaaccttcctcgattatcagtagatatcgatatggattatactcctaatgatacgagagagggtatgcttgaatgccgtgcaaagataacggacataattaaggaatacatggaatcagaagggtatcagttatcggaagcatcaagatttagccatagcttggatgcatttcactataattatcagaacgccggtggtaatagggatatgattaagatagaactcaattattccttgagggcgcatatctttgaaccggtgtacagaagcattcttccatcagcatttgatgatggattgaaaatacgaatggtaaatcctttggaaatatttgcagctaaaggcaatgctcttattacaagagctgcggccagggatttgtatgattggtgcaatatgttgtctgagggtctctttgaagaacagcgtgatttgtttagaaaatgctttttattttatatgacgatttcagcagatacgcttaataaatcatttgacacctcagctattgacacacttgatttcaacaaaatcagaagagatttatttccagtgcttaataagaaagataatttccagttggatgagagaaagaagattgcgaagaattacatatcggatctcatggtgttgactactaaagagaaggaatatattgatagattcgaagagaaaaaatacatgccggagttgctttttgaagacgcggagatagttgaaagagtgaagaatcatccaatggcactatggaaatgtaaggagtagattggctatgtatatattttgttccaaggcattagccgatgccttaaatatcaagaaaattacggtatatcttggtgcaaacgaaggtaataatcccgctgcaatttctttacttccgtgatacaaaatcaaaacttttctccttcatcctatacttcctaggtgtcactccatacttctgtttaaacgccttgataaaatggctgcagtcacaaaatcctgtctcctggctgatataagttaggtcaaaatctgtgaattgcaataagtcctccgctttttgcagtcttaccgtgagaatcatctccttgcaggtctgcccatagtactccttgaatattgcggcaaaatacgaataactcatatgaaatttttctgccagctccgccaccgagagatcttcctggtagtgctgtgaaatgtactcagatacctctgtaaatttttcgcttaatacagtttcctttttccttttttttatctgaaagccttcctgcttccagacacgaagaatttctgccataagaagacaataattcgaatgcataataatgtcataaccaaattgcttttcttctaacgtcttcactgatccctgaatcagctgcttcattttttcctgattaaatttctctttcgaaaaataaaccgatagcttctgctccactgctgccatggtgatcagactcgaaatcggtggaagcgccgaaccggatatattcagacctgttaagagatgtcaacacaatttttgatttttttgcataagaaataggcctgattattcaggcttttttcttatcgctcgaagtggacttttacgatgtcgaagccgtctttttcgaggagcgcgctgtgggttgttacaatattgtttacagttgaatagtagtacatatttaatcctcgctttcttgcaggtttaaaaaaagatttttggtattgcctttgaagtgggtgccgttaccggttcctatttcggaaaaagattctactgtttcggcgtacatttacatgatataattagaaaaatgaaaaaacaggacaggagggcaagcatgaatcaagaattgatgacattggatttctggcaggatacggtcatatatgagagcaaaacatttcctgtcggtacgcttgcctgtgatgcactgaatgttcctgtgaataccattgcaaaaataaacgagcaatgcgagaaaatcaatctgctgcttggaatattaaacgccggacaggatgcttctgcactctgtcctattgcaaaggaagctgctctgacgatgcttgatattctcagtcaaacaccgccgttctcctatatgaatatctcaaagcacagagaacggattgaaaaagtctttactgtggacaatgcgctgaaatatgtggagtttgccataaaagccgcaaccaattctttgcaatttgaagaaatccagaactttaccgatgcgatgatgctccaacgctataccgcagttttcgggcatctggcatactcccttggggcataccaaacggccatgcttgattttgcagaaaaaacagacggcaacgaagcagaccgcaccgcagagggttttgcaaaaatgttcggcagccatttcccgccggagttttccatcacggaaggcaatgcctggatgtctaccctgaacaattccgttcagtatgtatccgtcatccgtcccggcgaaaaagttgcgaagctggtcaagcggatgcactatgtatcctttgtgacacggatcatcgcagatgcagtcaccggctggttagaaatgccgcattttttgaacagaatgttccataggcattccacccgaaatcgcaggggcatgcttctcataatattagttatcagagtaaagtacggtatgcttattgcggcagttccttttagcatctagttgttggaatctgatgcagcttcggaagtaaccgctgagctgtcggttttggaggttgtttcggagctgcctgtctcagagctttctgtttctgtgttcttcatctcggaactttctgtctcagagttcttcgtctcagagctttctgtctcggtatttttcatctcggtagcggtcgtatccggaatctcggtcggatcttctgtctccggaacaatatccggatcctcgtagacaacctcgccggtaccggcacggagcagtaggctcttggaaccgaggatattcacggtaatggtatcgccgttctgcacattgtccagactggtcgtaatcaggttcgatgtcaggaacgtggtaggaaccttattgccgtttacaaaaatcttcgtattcttggtaaagttcgcaccgtacaccgtcaaggtattgttgcttgtattcttgcggacagaggagacggtaacgtcctccacatccatcacaaggtcggatgcagggtagcggtcctctccgccgtaggtgtagcgtttgccgtacagcagatcgtactgcagatcctccagaccggaaagataggtctcggaagcggtctgtgtctgatgataacggaacatggttccctcatgaatgcctgcctgatcggtaatgtgcgcgagaagctggtaagcggtcagatcagcatctttttttgcaagccccatgttgttccaggtgatgtacttggtcttgaaaatatcaccggacttcatatccgcatcggtaagtcccatcgttgggagatgatcgccgaagaacacgatgatggtgtcctctccgcggcggtcaaccgctgtgatcagatctccgatgaagtcatccacttcatgaatcatgttgacataatattcccactggttgttggaagcctcatctgcggcgccggaaacaagaatatccggattttccagaaccttctcggtcgggtaatcgccgtgaccttccacggtaatggtatatacgaaatcggactggttttccgtcgcggtcatagcttttacagtctcctgtaccagcacatcatcagtcggccagttgccattcggcgtgtactgggagatattcatgcactccttgctggtaaaggtatcgaatcccatcatggaaaaagcattgttgcggctgtagaaagtagcggtattgttatgtacgacatgcgtaccataaccgatctgggagagatcatcggcaatactttcgcagtccgtctgttttaagatcgtcttgtaaggatactcaccggtaccgaaatactgcatgctcattccggtcagaacctcgaactccgtattggcggtacctgcacccacgaccggtacggtaaggtaaccggtggaatagtttgcctcaaggttgtggaaattcggaatcggatcttcggacatatttaaaaagtttacttcgtaaggatcacagaaggactccagtaaaacacagataatatttggctcgctgcctgtggaaacagtggtcgggctgctggcggaatcaacaagggtgttgatcgcatcaacggtttcctcggaataatcctccggtttatccatgcctcttccgacaacactggtggaaaaaccgtacacaaaaccgtaatcagagtagccctgcgcaatatttgcaaaataggaagcaagaatgttggaactctgtgctgcctgtgtggtaatcggaagaccgattaaaatcagagcggcaatggagaccggaccaagcacggtatggcgttttccctgataacggggtccctttgcaaagagaagaccaagaatgacaaagaaggcaaccacaacggacacgaccatggttgcttcctccgctgtaaaatagttggtgttctgcattgcgaacagatccggcagacattttaagtctgtgtagctgaacggtgtgacacggtttgacagaatcagaccgttgacggttccaaggaaaatccacaaaccgctgattaagatacgcatctgtgtacgatattttgtcagatagacaagggacagagatgcaaagataatcagcgcattatataagaatgcaagcgtgtgattgctgatgaaagttatagcgctcacaaagtcccgtctggaaatcgtctccacggcaagaattaacagacaggctaataaaaagtggaaaataagagaatacttattaaggaaagcaatccgtttatagtatttttcactgtgtggcttcttctgcggaagaatgctcttcagagattgaagcttactggaaagcggtgcaagcttttcttttagaatgttaaataattttttcatagaaccctcccaaaatgactgtaggcggtgtgaaacaccgatacgctcacgcgtgcaatatatgtgggcagccgggctgccgattctccagtgtaaaactcctgtaaaaaggaagtaaagctaaatttcgatactaagagaatatagcgctaattgcatcaaaaatcaatcgggaagatgaataaaaaaggtttaagatttcctggatttctataaaatatgaataaaaaatgaacaaactatgtccaaatgaaaaatgtatcactttacaaacttgtcgatcgcatcatttaagtcccggatgacctgctcatccccggtttcaacggcgtcgaccaggcagtggctgatgtgatcctctaaaatgattttaccgatattgttgatggcggaacgcaccgccgcaatctgaacaagcacttcgctgcagtccctgtcgtcttcgatcatcgtgcggacggcctccatatgtccgatcgcacggttcatgcggtttaagaccgccttggtattctcgtggtgatgcggatgtgtgtgagtggagccgtgggcatgagtatgaacggagccgctggcatgagtatgaacggtgtcgtcagcatgcatgtgagtggagccgtcggcgtgtgcatgggtgatgccgtcaacgtgcgtatgagtgatgccgtcggcgtgtatatgtgtatttgctgtggaagtcttctgtgttttcatgggattcctccgattcgttgcatttcattcagtgtatcatattctcccgaaaaaaaacaggttgtcttttttgtacaatgcttatataataaggaaagaatttggcagacaagggggtatatcggggatataccccttattttacgcgaaaagcgcaaaggaaggaatagaaaaaggatgaatttactcgacatcataggacctgtgatggtaggaccgtcaagttcacatacagcgggagctgtgaagatcggcagagtcagcagaaagcttttagcggaggaggttgcggacgcaaaaatatattttcatggctcttttctggcaacgggcaagggacacggtacggataaggcgatcctggcaggactgctcgggatgcaggtggatgatccgagaatcccggagagctttacgatggcaaaggagtctgggatgagttttacactggaggggattgatcttggagatgtacatcccaactcggtcaagatgaatctgaccggaaaatccggccgtacgctggaagtcattgcggcgtcggtaggaggcggacagatccggatctgcgagctggacgggctgacagcgaatttcagcggggattatccgaccctgatcgtgcacaacatcgaccagccagggcatgtggctgaggtgacttcgatgctggcgcacaagtcggtaaatattgctacgatgcagctttaccgcgagagccggggcaccagggcggtcatggtcatcgagtgcgacagagaggtgccgggagaggcaatcgagtggctggagcatctggagggaattttaaaggttacctacttaagcatgctggaagcatagagacatcagacgggcagaaagatgcagcgtatgtgacgagaaggcggtgtaaaccgtctggatgatagaaaaacagagggaggatgacaatgtaccgatcattggaggaactgtgccggatggagagagagaccgggaagcctttttggaaaattgtgcaggaggatgactgtgtggagcagggcatcagcgcagaggagtcgtttgcacagatgcgcgggatgtaccaggcaatgcagtatgcagatgcacattacgatgagacgttaaagtcagcaagtggactggtcggaacagagggaaccaggatgaagcgggcgcgggaggcgggaacgctgctctgcggagactttatcggaaaagtgatggaaaaagcgctgaagaccagcgagtccaatgcctgcatgaagcggatcgtggcggcaccgaccgcaggctcctgcggtgtggtaccggcagtgtttttgagtgtgcaggaggagcgcggtttttctgaggagtgtatggtggaagccctgtatgtggcagccggaatcggcggcgtgattgcaaaccgggcgtttctggcaggcgcggcaggcggctgtcaggcggagatcggttcggcttccgcgatggcggcaggtggtgtgacgtatcttctgggcggcggtgcagatgagattgccaatgcagcggcgctggcgcttaagaatctgcttggactggcatgcgatccggtggcgggactcgtggaagttccgtgtgtgaagcgcaatgtcatgggagccgtgaatgccatgacttccgcagatatgacgatggcggggatcttcagtaagattccgccggatgaagtgattgatgcgatgcgcagtatcggccgcagcatgaatgaggatatccgtgagaccggaaaaggagggcttgcggggacaccgaccggagtagagatccgcgaccggatggctggaaccctgtagacaaccggttagtgccggaggacggctgacagatgggaagtggaatggtaacaggattgacaggatctgaaggggaagaatcatcctgttccagaatggaagcaggcgtggagaatcgttggagcaaaatacgtgaatttcttgcatgccgcttttgacattatattccgtgtctttgccacgtttggacaatccacaggaggtgtccggcaaaccgcagacaatgggcggactttctggtgtccctaagggcaccgcttcacagacaatataaaaccgcgcgaaccgaaactcgttggcatctgctattgaaaataaggcagatgccaattcagacatcggcttcgcgcggttatgttctgttcagcggtgcccataagggacacacacaaaagtcctaaaattgtctgcaggttgcgaacaccttctgcggagtgttccaaacttggaaagacatggatcatcgaagatgtcaaaagcggcatgcttagaaattccgtatttggcgattggattctccacgcctgctttcatctggaacatggctgttcttctggcctcagatagtgaaactatatgcaacattccacgtcccgtccgtcagtcgtcctccggtactagcggttgcttcttctccagatgtgcatctgctccgcctctttgatgaggtcgtcgcggaaatcaggatgcgcgatcgagatcagagcctcggctctctgccaggtagacagaccctttaagttcaccttgccgtattcggttacaacatagtgtgtattcggtcttgcgtcggtaacgatggaaccgtttgccagcgtcgggcggatacgggactgcacctgaccgtccttggtcttgaaggtagaggataagcagataaagctcttgccgcccttggacagataagctccgagcacgaagtcaagctgtccgcctgcgccgctgatctgcttgatgcctgcagactctgcatttacctgaccatagagatcaatatccacggcattgttgatggaaataaagttatccagtgcggagatcgagcggatgtcattcgtgtagtcgaccggagcgctcatcagttccgggttgtcgtccagataatcgtacattttcttggtgccggcgccgaaagcgtaggtctggcggtaacggtcgatattctttttggaaccgttgatcttacctgcctttgcaatatcgacaaatgcatccacgtacatctcagtgtgaacgccgagatccttcaagtcggactctgcaatcagggaaccgacagcgtttggcatgccgccgataccgagctgtaagcaggcaccgttcggaatctcatcgacgatcagctttgcgacagccttatccacatctgtagcaggaccgcctgcaccaagttcaccgattggcgggttggagccttctacgatgtaggtgacatcggaaatgtggatgccgcactcggtaccgccgaggcagcgtggcatattttcattgacttctacgatgatgtgctttgcgcgctcgcacattgcacccagatgtgaggcactcggaccgaagttaaagtagccgtgcgcatccatcggagcgacctggaacatggcaacgtcatccgggcagtcaagctcgcggtagtagcgcggcagctcggagtagcggatcggacagtagtaagccacgcctctgtttatcatcttgcgctcgataccggacatatgccaggagttccagcagaaatgctcgcctgcatcctcacgtgcaaaaacagccagcggcttcatcaggataccgccgcgcagcttgacgtctgtcagttcgtcggtgcgctttgcgagagcctgatccagtgcgtcaacggtgttggtgcaccagccgtaatctacccagtctccggatttgatgagctttaccgcctcatctgcggagacaagcttctgtttgtattcttcacgaaaatccatctcaaatacctcccacacaaaagattgttaaaattttaccatagtttcatcctatcactttatgttgtattttacaagccctgccggagcgtatttccggagatttgtaagatcaggtctcctccggcatccgccagtctctggaagcctcccggtatttgtcgagcatcatttcatactggatggtaagcgctgtgtcggaaggaattttggcttcctccccggcgaggagcgtctcgtaacattcgacgagaccgagcagcggaagatccccgcttgtgtgaacgtccaggatgctttccgtctcgtaggcggcattgtagaaccagagaaccgcttccgcgtagtcgcgctgtcccacaaaataggttcccagttcgtagcagatctctgcgcacggcgtggtgagcatatccttcatggtcagcttgaaaaattcgttcttgttatcctccatgcggtaaatccgggcgaggacgcatgcagcttcctttcgggcgtcatctgccgggtcattgtcgaaaatgagctggaagatcggttttgcatcggtaaaatcctttttgtcgccagtctttagaagttctttggcatacatggtacggattttcggggaaaattgtccgtcgtgttcaaacgctttgatgaagatggagaagtcgcgcttgctgtgcagggactgcggacagtgcagaatctccacatcgctgtcaaaagtgaccggcgttaagcggacggtctcgtgaattggatcgatccaggtaaacgtgcgcagtctgcggaacagctttggacggtattccttttttgcattcaaaacggtatcgaacgtgccctgcgtcacatatttcatctgtacaatctcgatctcaggcagaagggcacctttaagacggagaaaacgctcgcggtttgcgtcgtcaagaatttcatcggcgtcggcggtgtagatatattccatcgttgctttggaaaaggaaaaattgcgtgcggcggaaaagtcgctggtccatttgaaatcgtagatccgcgaggtgtactgtgcggcaatttctttcgtgttgtcggtggagccggtgtctacaatgatgatctcgtccatgagatcggcgatgctgtccagacagcgcgccagcactgcggactcattttttacaatcatacataaactgatagttgccatagtttctcctttgtgggaggcagtgacatgccgctgccccgtgcgtgataacttctatcctaagtataacgcagcgggggatggcaggcaaacaggaaaataaattgtcgtggcaagatggaaggttctgtgctaaaatgagcggtggttatgtctgcagggcggacggaagacagatggaaacggagtatacagataaatgagacaaaaagaacaatttatgcagaagacgatcgtcgtgtggcagcccgggaaatgttgcagtcttcgggtttatgaatccggtgtgtggtgtgatcctgtccgcagttctgctcggtgagacggacagcttaagtgtgatgccggtggctgcgctggtgctggtatgtatgggaatttatattgtaaaccgaccggaaaagacagaataaaaaaggaggaacctatgagcgcgattgttacattaaaaaaaggtgagggaagaaccatcaaagccggaggaatgtgggtgtttgacaatgagatcgacacggtgaccggaacatttgagaacggcgaagtggtgctggtacacgattttgacggttatccgatgggaagaggttttatcaacgtcaattccaagatccgtgtccggatgctgacgagaaagatcgatcaggagatcgaccgtgcatttttgcggatgcgcgtgcagaatgcgtgggattaccgcaagacgacagtggatacctcttcctgccgcgtgattttcggggaggcggatttcctgccgggactggttgtagataaatatgaggacgtgttggtcgtggagtgcctggcgctcggaatggagcagttcaaggagacgatcgtggaacttttaaaggagacgctggtgaaggatggcatctgcatccgcggtgtttatgagagaagtgacgcgaacgagcgcaccaaggagggactgccgaaggtaaagggatttatcggcggggagttcgacacgaacgtggagattgtggagaatggcgttcattatatggtagacgttgtgaacggacagaagaccggatttttcctggatcagaagtataatcgtcttgccatgcagcggatctgtaaagggaaaaaggttctggactgttttacccacatgggaacgtttgccttaaatgcaggaattgcgggcgccgcagaagtcacgggtcttgatatttccgggtatgccgtggagcaggcgcgggagaatgcgcgccggaacggactggaggacacggtgcagttccgctgtgccaatgtgctggatgaactgccgaagctggcacagagcggcgagcagtacgacgtcgtgattcttgatccgccggcattcacgaagtcgcgtcaggcgacgaaaaatgcaattaaaggttatcgtgagattaacatgaaaggtctaaagcttgtgaaggacggcggctatcttgccacctgctcgtgttcacactttatgacacaggagctgctcgccaagacgatccgcgaggcggcacgctcggcgcacaagaggctgcgccaggtcgagttccgcacgcaggcaccggatcacccgattctgtgggcggcggatgagagttattatctgaagttctacatttttcaggtcgttgacgagaagtaagggctggaaagtggcggtaatgcttgatttataagggctggaaggtgtctggtgattcgcctgcaaacctcataaagtatcgcaaaatatcgtatcacagtggtaagaaaagtggtaggaaaagtggtaagtctgagtggtaagcacctgaaatgtaatgaatggtaaccatgaaatgataatgatatcggagaaggttatatgttcgctcttcataatacggaaattgatagtatagatgtagcgttttgtggtatactatagaagatacaaatacctttctgtgaaagggaaaggagaaaggatacgcgtatgacagttgatagaagagtaagcagtattgaatccagtttcaaaatggaaggcatgccatttgacgcagaatgtcgtcaaagagtaagaaatgtcttggtcaagaaggtttctgcggcagatgcaatttcagaattaaataagaaatacagagtatccaagaagcaggttgaaggatcaagagtatgattatttctatgatgatgaacaggatgctaagtactgttatccgggcacaaatgtattaaagaataaactggatataaaagatttagatacattgcacgaggctgaaagagactattcggcagtacgtcaggcagaacttgtaggtcaaggcgttaccggggatttctcttttaagcatctttgctctatacataagcatttattcagtgatgtatattcttgggcgggcaagacgagaacggttgatatttccaaaggaaccgttttctgtttggtgcagtttatcgaaagccagtttgatgatttgtatcgtaagctgaaaaaggaaaatttcttagctgacataaccgataaggaagaaatgagcgggagactagcctattatctgggtgagattaatatgattcatccttttagagaaggcaatggaagaactcagagaatatacattgagcagttatgcttgaataatggtagatttgaaattgattttaccgatgtttcaaaagaagagatgatagctgccagtgtcagatcggcaaatgcgagtaatgatatgctggaaaaattgattaagagttgtcttgttgaaaaatagttttagagaagaatgtacgttccgctttgagtataaaaactgatttttgaacttaccatatgttaacgacaggctaacgatagactaacgacggactaacaagaaactaacgacagactaacaacgatataattgtaatgccaaaacagatatgatattattatcatggatttggtaggacaaagcgaccaatcattcgtgtccacaaaagactactattttattacaaaaaactactaataaatttacatataaaactaataaatttacgtataaaactagtaaaaaactaatatataaccactttcatttttattgtggttgtagtaatattattatggcaatcgaaacagagatgttccggttgctttttttatgccatgaaagggtgaatctgatggaattatatacgagagagaaagaactgttaattatgttcgggagtgagagaaggcttgaattctctgtataaggtggctgctactgctttatggaataagctatacaacaacatatgcgatagccaatacgtacttatgtactggcgtacacgagcagaactgtctggcatagaaagcaatatcagcaggcgagccattaacaatgaataaagctacagaataagggaaggactgccggatgtggtatttcacagtcttcgtcatacgagtatacttgtctgaggagtttcatcagctggcagtccagaagaaagactcataatcttcttcataaaatgtgctccctttcattcatacaacgtaaaagactaacgaacatatttaatgaaacatcgaaaccatcttctttttgttgtttacctataataacgattggagtagtcgattatagacactgcaatcaaaaaaatctgaaaatatatttatcaacattacataaaagtgtgtagatgcacataaaatgggaatacatattgaaattcaggtcgttctgtgatagaatctcattactaaaaagtgtgcagatgcacggaaatggggagcgtaacgatggagattaaaagagacgcttacctacagcagctgatcaagcgaaaagataatggaatgataaaggtgattaccggcattcgtagatgtggcaaatcctttttgctgtttaccatctttaagagatacttactggagaacggtgttgatgttgatcatattattgagattgcattggacggtattgaaaatgaggaactaagagatcctaaggtgtgtttcaagtacatcaaagatgccatgaaagacgatggcaaatactatctgcttcttgatgaagtgcagtttatgtcacaatttgaggaagtgctgaacagcctgctccgcatgagcaatattgatgtgtatgtcatcggaagtaattccaagttcctgtccagcgacattgtgaccgaattccgtggcagaggtgatgagattagaatctaccctctctcctttgcagagttttattctgtccatgacggcgattatgatgatgcatgggatgactacatgatctacggaggattgccgcagatcgtaagtttccagagcgaacgacagaaagcggactatctgaagaacatctttgcaaatgtctatctgaaggatgttattgaaagaaataagattcagaacgtggatgagattgggattctggttgatgtgcttgcatctgcaatcggcgcaccgatcaacccttcaaagattgccaatacctttgccagtgagcgccagatgacttatgctaataaaaccatttccaagcatatcgactatttgacagatgcctttttgatttccaaggcaagccgatacgatattaagggcagaaagtatatcggtgcaaatctgaaatactactttacggatctgggactgagaaatgcacgtctgaatttcagacagcaggagcctactcatatcatggagaacattgtttataatgagctgttgatccgtggctacaatgttgatgtgggtgtcgtggatatcttcgataaggataaagagggcaaacgtgttcgcaagcagttggaggttgactttgtggtgaatcaaggaaaccagagatactatatccaggttgcatatgacatgacttcggaagaaaaacagacgcaggagttcaattctctgcgtaatatcccggattctttcaagaagatcgtcattgtaaatggcagcaaaaagccttggagaaatgatgaaggttttgtcatcatgggaatgaagtatttcttgctgaatgcgaatagtctggaattttaagtcgatttgagttgttgctgtggtgttgttctatttcaaaaaagagtgaaatgatataaataaggccagccgatgtggtagcatttatatgggagtacatgaaagtaccggaggattcaagagaaaaagttaagaatctgcttaaagatgcaaatgaaaatggagtaaaaataagtcatcaggcaccaacactgtatgatgttgttccgaaagaagaaattgctgaatttgaagagcttatgcgcaaaaccatagctgacattgtatcagaagccagtagcgttgcctgttgggtgtatgtgcagaaatatgtgaagcacaaaaccctaaacgaaatgctgcaagaattgccagacgtaagtcaattcatcctagctatggatacctggtttgaaaaactgatggttatcgaagctatcattgaagcagataatgaaatgcagagaataaaagacaaaattggtatgttacacgaaatttagggagaaaactgagcaagtaggaaggtggaatatatatgaaacaagatactttagagggcaaagcaaaaacaaaaaatggggtaaaacggctgtgtttttccataatctgcattcttctggaagtgatttttattattactatcgtaacacgcttgaatgaatatgcagaaatcataaatttatttacaaggattttgagtggaatcttggttttgggattgtacgcatcaaataagacatcctctatgaaaatgccttgggtcatcttaattctaattttcccaattatgggtgtaggcttgtatttgttgattggtttgaatggtggcacacataaaatgcgtgagcgatatgcagaaattgatagcaaattgttaccaatgcttccggacagtcaggagtgtttgagcagaataaaagaaacaattccgaaagcaggaaatatagcaagttacatacaaagaaattcgcagtatccaatctatcagaatacggatattgtgtattttgatgaagcagtgaaaggattagaggcacagcttaaggatttggagaaagcacagaagtttatctttatggaatatcatgcgatagaagacgctgaagcatggcataagattcaagatgttctggaagagcgagtaaaagcaggtgtggaagttagagtattctacgatgatatgggttctataggctttattaacacagattttgtgaaaaagatggaggcaataggaattcattgccgtgtattcaatccgtttatgccaggtttaaatctgtttttgaacaatcgtgatcatagaaaaataacagttattgatggaaaagtcggatttacaggtggatataatctagcaaacgaatattttaattacacacacccgtatggacagtggaaagatacaggtattcgtttagaaggagatgctgttcagtcgcttacggtgacatttttggaaatgtggaatgcagtaagtgataaggatgctaatgattctgattttagtaaataccttttccactatgattatgcggcacagcaaactgggtttgttcaaccttatgcagacagccctatggataatgagcaagtaggagaagaagtttatatcagtatgataaataaagctgaaaaatattgttggtttatgactccatatctaatcataacagatgaaatgacgcatgcgttatgtctggctgctaagcgaggggtagacgtaagaattatcacacctggtatccctgataaaaaattcatttataatataactcgttctttttatcatggattggttaaacatggtgttggtgtttatgagtggactcctggtttctgtcatgcaaaaatgagtgtggcagatgactgtatggcaacttgtggaacaattaatctggattatcgaagtttatatcaccattttgaaaacggctgttttatggcagattgtcaggcagttgtggaaataaaaaatgatctgataagaacgatgggagaatgtcgtgatgtgacagaccaatatcaaaccggacgaagtgcatatttgcgattgggacaattatttatgagattatttgctggattgctataagaatctgatgaaacgacctttcaaaaaacagttgatttagaagttaactgtttttgaaaggccgtttttgctatatctaacagtctgttgtacaaagaagattttgcatggatgaaaaaacaaaccttgttgaggttaaattgagttttccattgtattgtattgctaatgaataagaataagaaaaagaacagacaatgctgaatgctctggaaacaagaatatctgagtatagtatgtaagttcgtaacagaatgaaaggagcgattcaaatgagcaatttggaaaattatatgaaacagcaagcaattttttgtgaacaaaatgatagcattagtaagaatctgtattcagagtatggtgtaaaaagaggcttacgagatgaaaaaggccaaggtgtgttgacggggcttacaaatatttctgatataaaagcttttgaatattgtgatggagtaaagagtccatgtgatggcgagttatcttatcgtggttataatataaaagatttagtaacaggaagtaaaggaaaaaggtttgtctttgaagaaggagcatatcttcttttattcggagaattgccaactgatacacagttaatggaatttcagggaagactatctgattgtatggaactaccgactaactttaccagagatgtcattatgaaagcacctacatcagatattatgggttctatgactcgaagtattcttacattgggctcttacgataaggagaaagaaagtcttgaaattccgaatgtgctaaggcagagtatgcagttgatcgcagtatttcctatgttagcagtatatgcataccatgcttattgtcattatgaaaaaaacgaaagtatgtatattcatagacctgaaaaagatttatctattgctgaaaatttcctgcgcctattaagaccagatacaaaattcacagaactggaagcaagagtactggatatagcattattgttacatatggaacatggtggtggtaacaattctacattcactacacgggtagtaacatcttcaggttcagatacttattctgttatttcagcagcaatgtcatccttaaaaggaaaaaaacatggcggtgcaaatctgatggtaatgaatatgatggatgatattaaaagtcatgtgaaagattatgaagacgaagaggaaattgcatcatatctgagtaagattttgaagaaagaggcgtttgatcagaaaggacttatttatggaatgggacatgctgtatattctatttccgatccgagagaaagggtgttcaaaggctttgtagaacaactcgcaagggataaaggacgtgagaaagatatgaccctttataacaatattgagaagattgcacctaagttgattgcaaagcagcgtcagatattcaaaggagtaagtcctaatatagatttctatagtggttttgtgtatgacatgttgaatattccaagagaattgtacacgccattatttgcgatagcaagaattgctggttggagtgcacatcgcctggaagaattgataactacagataagatcattcgcccggcatataagagtctagtcagcaaaaaagaatatatagaaagagaggaacgataatatgggagcaggaaccagtgcagaggagttttttttaaagagcatcaatgttgaaagtatatttgaatttgtcgaaagaacagattatttgttcctttatagtataaaggaatgtgttgaaaaatcagactgtcatgaaggagtatatctttcagaagtggcagaatacatgaaattatcgattccagaaacatctaagatggtaaaaagtcttgaaaataaaggatatattatctggaaattagatgaaaaaaaagaaagaacgtaccttgttttgacgaacaaggcaattgaattaagtaattgtcagaaagaaaaaatgatagaagcttatgaaaaaatcatatcgaatatacaagaagatgacctggaagttacacggtgtacattgagaaaaatccgacagcttatggaagaaataaaatagtgattaatacaacggagtaagaaaagctccttcatatattagaataaaaatatgactgtttctttaaaaagaagcctgtcatatttttttatgaaaaataaattttgttgaggttaaattgagattgactttgtattgtatcagtatgaaataaaaaggaatcaggtgatgtacaatgaaaaagtataaaatatgtaaaatccttcttgttatactggcaatttttttatgtatggctttttatgaattgctcggaatctgcgttgcatataaaaagcagccggaagtgtccaatacaaccaaaaaagaaacaaaaaatgggtcatggaacgaatgcagtgaaaatacagaacgggcagtaatcatagaaaagaatccagaagcgcttttacaaagagtgcgtttgatcaagaatgcaaaaaaggaaattattctttctacttttgcatttcaatccgatgaaagtggaaaattgattttaggagcactgcatgatgcggcagacagaggtgtacatattcgtctgttagtagatggaatggagagctggattgatatggaaggaaatccgtatttctatggattatcttcccatgagaatgttgaaattaaactatataataaggccaatccgttgaaaccatggaagatgatgggtagaatgcatgataaatatttgattgcagatggaaagagatatattcttgggggaagaaatacatacaattatttcctgggtgattttccgggacataagaactatgacagagacgtgttagtagtttgcgatgaacctgagaaagaaaattcagttaaccagttgttagagtattttgaaacgatatgggaacaagaagacagtggttattttcatgacaataaaaaactggcaaatagaaaatctgtaaagaacgcagttttagagctgcagaacggctatcagaaatattttgaagagaataaggaaagaatctgcgataccgattacacggacgaaacttttgagacagaaaagattgcattagtgtcaaatcctattcacacaggttccaaagaaccagtagtgtggtatcagttgggagaattgatgaaaaatgcaaaaaatcgtgtgaagatccacacgccatatattatctgtaatgatatgatgtataatacatgggaggagattgcagagaacgattcagatttttctatcatgacaaattcagttgcaaataatgggaatccatttggggctgccgattatgcgaaaaacagaaatagaatcttaagtacaggaattaatatctgggaatatgaaggcggttattcataccacggaaaaagtattctgattgacgatgatctgtctgtaatcggttcctttaatatggacatgagaagtgcatatctggatacggaactgatgcttgtaattcacagtaaagatattaataaacagttggaagagggcatgatggaatatgaaagagtgtcccgccaggtattggaagatggaacctatcgtgatccatatcatgtagagccaatcgaattaacaaagaaacgtcagagaaaaatatttttggtacagcatctgcttggatgggcaaggtatctgttttaataaggaggaaggaaaacgtgtttcaaatattgattgtagaagatgataaagaattaagccagctattccaaaaagtgcttgagaagaatggatatcaggtcaaaagtgcatcggatggagcacaggcattagaagtattggataaggaatatattgatctgatcatttccgatattatgatgccggttatggatggttatgaactggtgtcggaactccgttcagcaggatatcagataccggtacttatgatcactgcgaaaggttcctttgatgatatgcgccagggatttctttcgggaagtgacgattatatggtaaaaccggtaaatgtgaatgaaatggttttaagagttggagcactgcttcgccgtgcacagatactgaatgaacacaaaattgtgatcggttcaacagagtttgattatgatgcaatgacggttacaactgataaggaaagtcttgttttgcctaaaaaagaattcctgcttttatataagcttgcagcttcgccaggcagaacatttacaaaacaacagttgatggatgaagtatggggatacgagacggaggcagacccacatacgatagaggtacatataggaagaatcagagagcgttttaaagataaccctgattttgaaatcgtaacaatgcgtggaattggatacaaggtggtgaaaaaataatggaacaaaagaaagaaaaaggattgcggatccgatcctgtctgactggtgcaatctggctggcacttgtattttcaacagtcatatctgctttattatttgcttttttgaatcatttttttaatctgccgggcagcatacctgtgcttggctggcttttgattttcaatacattgattgcagggctgatcacttcctttattaatgcaaagttactggaaccaattaccagacttagtaaagcaatgaaggaagtttctcagggagattttgaacagcatttggaaacgaacagccgtatagcagaagttggagaatcttatcaaagttttaacgttatgacaaaagaacttcgtgcaacagaggtgctgcagatggattttgtatctgatgtttctcatgagtttaagaccccgattaatgccattgaaggatatacaatgctgcttcagggagaagaactgtctccggatcaagaggaatatgtagaaaaaatcttatttaacacccaaagactttccggattggttggtaatattttgctgttatccaagttagagaatcagaatataccaatgaaaaaaacagaatatcgtctggatgaacagatccgccaggcatttctttcattggaaacaaaatggacagaaaaagaaattggttttcaggtagaattggaggaagttaaatatactgggaatgaaggactttttatgcatatctggataaatcttttggataatgcgattaagttcagtccttcaaaggggacaattacgatgtttctgaaacaagaacaggattctgttaagttcattctggaagatgaaggaccaggaatagaggatgatgtaaaatccagaatatttgacaagttctatcaggtagatggatctcataaagcagaaggaaatggcctaggtcttgcacttgtaaaacggattgtagatagtgccggaggaacaatcaaagcagaaaaccgtgaatatggtggatgcagatttgttgtagagcttccaatacagaaagatgagaccatataagtttaagaaaaacagatagaggaggaattacatgacattttatcaggagttgcagttaaatcaggcaggttctaaaaacctgttgaaaaagagtgaaacactaaaagaaaaattatatcatatgtgggtatatctggtgaagatagctgctacaatggcattttgttttttctttgttagtattttcagtatcctatttggaaatgagaacagcattgtaggtgtagtagtcttattatgtctcatggtgtttagaaatgcggatctggggatccacaccggacaatctacgatgcttttggctttgttctttgtaattatgactgtatgtccgcatttagcaaatcagttttcaccggtattgggaatgctgttaaatattgcggcactggctgtgttgattctgttcggatgccataatccattcatgtttaatcaatctacattggttcttgggtatctgctgctatatggttatgatgttacgggaaaaagctatcagatgcgattagtcggaatggctttaggtgcagcacttacctgcttcgtattttatcgaaatcataaaaacagaacttataaaagaaatctgaaagatctgatacaagaatttgatatcacttcttccagaacaaaatggcagatatgtcagattttatgcgtaccgattgtcctttgcattgcagaactttgtaatatgccacgtgcaatgtgggctggtattgcggccatgtccacgattttgccgtttatggaagatatgcactacagagtccgtaaaaggattgtcggaaatattgcaggtgttatatgttttacagtattatattttctgcttccttcgtcaatctatgcatatataggaattcttggtggaatcggtgtaggattttcagcacaatatggctggcaggcagtatttaacacatttggtgctttagccattgctacagagacttatggactacaaggagcggttagtcttagagtgattcaaaatgtttttggtgttgtgtttgctttagcattttgtgttatattttattggtttatgtctaaaaaaaacggttcatgcggggcttaatgtccgctttaatgaagaaaatcagattacttctgaggacgaaattcaaaagtgggcgaaacagattgtaaaatagtacttttagttgagctgatcagatgataggtaacatttacttccggatcagttaagggaatctgttttcgtcctttcagagtctgatctgaatcggtggttttactgctggaaaaacataataatgtggaagtccggacaagttcttcaaactcaaattcatctgtctgtatcagaaagcgggatgctggcattttgctctttaccagatttgtccagaaaccgatttcatcacgaagaaggcagttaaaaccgttaagctgtggaaggctcagctgtgaatgttctgccagtttgtgttctttcgggatgcagacatagagctgttccttaagataagggatgcagagaagatttttatctgaacaggactgtggaagaataccgatatcagcattgccggaactgacattttgaaggatttcatccatatttgtcagttttgaggaaataatattatcagggaatctgcgtgacaattcaggcaataatgaccatagaggtacgggagcacaggaatgaatggtaatcgtatgctgattgcgttcaaatgtctgtacggtctcaaccgctttttctgcttcagaaagcagagaccttgcctgttctaccgctacttcaccggtatcggttaattcgatacggtttttaccacgatgaaagagtggaacaccaaaagcatcttccacatcatgcatggttctggtaagagtgggctgagaaatatgaagtttatctgccgcagcagataaggtaccacagtctgcgtaggttacaaactggtaaaggtctgataagtctaacattttgatactcctttctattcataatatgaatagcagatttcgaaattgatattgtacatattcattttaacaggatataatttgagcgtaaacagaaaacaagaaatatcatatttcataaaatgaatacaaaaggaggacgaaacaatggattatgttacattaaataatggtgtaaaaatgcggcctgccaagagaggaacttttcattaccacaaagatctggatcagcaatgcaggatatgaaaaggcaaaggtttcgattgaggaatccttgaagaaactgaaaacagactatgtggatctgcttttgattcatcagccatttggtgattattacggaacataccgtgcaatggaggaagcctataaagcaggcaaggcacgtgcaatcggtgtttcaaacttctatccggaccgttatatcgacattgcacatttcgcggaagttgttccagcggtaaatcaggtggaaacacatgtattccagcagcagaaagtggctcgagaatatcttgcaaaatatcatacacagatcatgagctggggaccatttgcagaaggaaagaatgatttcttcaatactccggcactgaaagaaatcggagcaaaatatggaaagagtgtagctcaggtggcacttcgcttcctgcttcagaatggagtcgttgtgattccaaaatcaacgcacaaagaaagaatgcaggagaatttcaatgtgtttgattttgtgctgacagatgaggaaatgaagcagattgaaacacttgataccggaaagagtttgttcttttcccattattcaccggaaacagtggaatggtttatgagtattgtgtaacaaaatagcttcataaaggcaatagcgtattgcggtttatgcgaccggcaatacgcttttgctgtataataggatatgaaaattgttatacggaaaggataagaaaatgaaggaacagaatcatccgaatgtgattaaaattcgaaatgcacatgttcataacctgaaacatatcgatgtggatattccactaaataagattgtgggaattgccggagtgtccggttccggaaagtcatcccttgcactgggagtgctgtatgcggaaggttcacggagatatctggatgcgttatcgacctataccagacgaagaatgacacaggcaccgagagcacaggtggatgaggtgctgcatattccggcggcactggcattacaccaaagaccgggcgttccgggaatccgaagtacgtttggaaccggatcggaactgttgaatacattacgtttgatgttttcaagacttgcaaatcactgttgtcccaatggccattatctggaacccacacttgatgtggcggcagggaaagaactttgttgtcctgtctgcggaacacattttttggcaccatcagcggaagaactctcttttaattcgcagggagcctgccagacttgtggcggaacgggatttgttaggaaagtagatgaagcttcgttggttccggatgaatcactgactattgatgaaggtgcggttcttccatggaaaacattgatgtggtcactcatgacagatgtatgcagggaaatgggagtccgtacagatgtaccatttcaggaacttacaaaagaggaaaaagagatcgtatatcatggaccggcagaaaaaaagcatattttttataaagcaaaaaatacaaaccagtccggcgaacttgattttacatatttcaatgctgtatataccgtggagaatgccttatccaaagtaaaagacgagaaaggcatgaaacgtgtggaacgtttcttgaaagaggatgtatgtccggattgcggcggaacaagactttctaagagagcgagactgccaaaattatgcggcatcacactggcagatgcctgtaagatgtcactttcagagcttgtagagtgggtaaatcatgtgccggatgccctgccagaagaaatgcggttaatggcagaaaatatctgtgaatcttttcagatggttgcaaaacggctgatggatctgggtctgggttatctgtcattggacagagcggcttctactctttcgacaggggaacggcagcgaatgcagcttgcacgggcagtcagaaatcggacaacaggagtattgtacgtgcttgatgagccgtctatcggtcttcacccatccaatatcgtgggactaacggatgtcatgcatgatctgattgcggatggcaattctgttattctggtggatcatgatacgcagattctttcagaggcagactggcttgtggagatgggaccaaaagccggggcagacggaggaagaatcattgcacaggggacgattcctgagattgaagcaaatccggattcccaaattggaacatttctgaaagaaatgcatcctatttatcggaagaaagcatctgaacaggaaatgttttctttgggaaccatccacctttcgacagatgctattcatacggtaaagccgctggaagcagatattccaaaagggagacttacagtggtgaccggtgtctccggttccgggaaaacgacattgatactggaaagtctgattccggcattagagtcgatgataaatggaacaaaacttccctctcatgtgaaaaatattactgcggaagatattgaacaggtaaaactgattgatgcggcaccgattggaatcaatgtgcgttctacggtggcaacttatgcaaatgtgcatgatgagctgcgaaaggtatatgcaaaacttccggatgcaaaggaagcaggatataaagcaggggatttttcttacaatacaggaaaactgcgttgcccgacctgcgatggaacaggttctatcagccttgatgtgcagtttttaccggatgtggaagtaccttgtccggattgtcatggaagcagatataacagggacgctgggaatattaaaaggaaaacaaagtctggagagttatattctctgccggaactgatggatatggatgtacaacaggctctacgtgcctgtgaggatatgaaaaagatatgctcaagattgcagattataaaggatctgggactgggttatctgacattaggcgaagcaactccaaacttatccggtggagaggcacaaagactaaaacttgcatcggaaatggaacgcaaacaggatgcgtcggtgttcgtcttcgatgagccgacgattggtctgcatcctcttgatgtgcagactcttttgaaggtttttgaccgtctggtatccaagggtgcaacagtcattgtcattgagcatgatctggacgtgatccgcaatgctgattatatcattgatatgggaccaggaggcggagaagccggtggaagaatcattgcaaaaggaaccccggaggaaattgccagtgacagaggaagcataacggggaaatatcttcgatgatcagcattatgaaaagaccgacaatctcagaaagtgaggatgccggtcttttcctataattctaaaatctcttgaagctggaagctgccgcaaagtttccggagattcttttccaccacgttttgcctaggtaatgagtgtgccagagatcatagatgaaagaagagtaggaaggcagtttgcttataataaaaaatgcggtaatgatatatatgacaaatcattggagtctgaaccaggtgtagtctttaaattcttttcagcttcccagcagtcaatgcgaagcatatagtctgcactggtataaacatcaatactgttacactgtggattgtattctgcaaatattgttctcatcgtatcttatctccttattgatcaataaatcatcagttacaaaaatcagaagcatttcaatcagttcaccatgtcagttttattttgtgttatactgttttatatgatttttcttggtctccgctgccgcttcggtcggcacagagcagatgtccaccggacatcttgtgcccttgtattttcacttatcagagttcgtaagcactggcgggacgatataacacaagggaaacaataagggaaagttcacctgcgacaaatccagtgttttcaagggtttgcagagaatttaataacaaaatataacagttattaaatctcttaaaacaggtgaaatctcaatcggaagttgaggaggtaaagagtgtatgaaaaagaaactgtgtattctggttattttaattgctgtgttattggtaggaacagtaggttgctatttcatgccaaaaaaattcggtaagaatgtaaatccttctgaggtagaccatataaatgtgttcgatggaaatacaggaactggttttactatcaccgattcagaagatatcgaatatatagtggcgaatattcaaggtatttcaatgaaaagagatggcatttcacttggaagaacaggatacagtttcaaaattagttatataaacagcaacgataaagatgtcatacctgtatttattctcaatagtgataatacaatttgtaaagatccatttttttatagatgtgatggcggattatgctttgattacttaaaagaatgtgaagagaaatatagaactaatgtaacagaatctatagaagaaaaataacatccagtttttgaaactaagaaatcggaattgaccgagctctttaaagcgagggacgcttcttgtccgaagggcaagaagatggagcatggaaagagttaaacaaatcgttgtttatcaagctgtttgattttgaaaatttctttgaaaaactattgactcctacgtaacgtaatagtttagagtatgcttatcgagagaaggaaatgacaatgatgacggtgaatgaagtaagtaaattaacaggagtgagtatacgcactctgcagtattacgacaccattggactcttaaaacctattgaatatacagagtcaggttataggttgtatgacgatacatccttggaaaggctgcaacaaattttactatttaaagaattggaatttccacttaaggagattaaaaagataatcgatgctcctaactttgacaggaacaaagcattagagcagcagattgacttgcttacgatgaaaaaggagcatcttgaaaatcttattagtttcgctcgaggaatcaaaggaataggagtgaaatatatggattttaaagtatttgatacaagaaagattgatgagtattctaaacgagcaaaagaacaatggggacaaacctctgagttcaaggagtttgaagagaaaacaaagaactggacgaaagatgacgaagctactgccgcaaatgagtttatgcaattatttgttgaatttggacaaatgaaggaaacgaatccggcagatgagcaggtgcagttgcaggtaaggaaacttcaggattacattacgaatcatttttatacatgttctgataagattttatgtggtcttggaagaatgtatgctggtggaggagaacttacggaaaatattgacaatgttggtggtacaggcactgcggagtttgcaagtaaagccattgatatattttatatgagcaaaaaataacttcaaatttatagagataatacaaaaattatttttgcataaaataagaatcctgccggcaggattctccgcctgcggcgggtcgttcctgcgacatctttcgtctccgtttcgctcagatatcgtagctttgctgcaaaaagaaaaattgaatttgtaaagaaatcagcaggggctgaaaaaggaatcgagaaatcggttctttttttagtttgcgcgccatgggcgctctgacgggtgcaagtcccgaacgcgcccggatagtggtaagtgagtggcaggcttatggggaaaacggtatttatgaatgcactttccgtgatattgaaaactcggctacaggcggcaaaaaatgaatatttctttaattttggaatcatactatttacattaatgaaagactaaggtaatcttttgaaaagtattcacagagtacgaataataagaaatgaggtagattgaagatgaagaaaaaaataattatgattgtggcttgcgtgatgtgctgtgctggattatttggcggctgtggacagtccgggatgaagcaggataatactgcaataagcaatagcgaagaggggaaacaggaaggaacaacagaagaaaaagaagtgaccggaacgattgatgagataaaagatttcatgtttgtcgttacagatgagaatgatacaccatatagctttacttttgaggaaaagccggaaggactggagaatgtcagcaacggagatactgtgactgtaagatataccggaacaatttcagaggtagatccgtttgagggagaggtaatatctgttgaaaaggcacaataaggccagaaaagcgactgaattactggcggttattatactcgcatctgcgatactgggagcctgtgcagaaaacgtacagaaacagaagatacctgccgcaacttatatgggcgggaaggcttccattaccgagatctgcaaggaactggacgctgcaggagcttcccatgtagatttatttcaggagtgggtgaccgattttgcggattctgcggggaagaatgcaaggctggaggatgcctggtcagatcctatgaagatgaaagcagatatcgtaaaatgtatggatggctgggaacagaatcatgatgattcagacgctgactgcaggatgacagcgttccttttgctggatgggatgctttgctcggagtcaacagaaggcaattatgcaggcacatatttaatgtttgacacggaagcgatagataacgtggacagatatgaaatcataaaaaagaatagggacatgttcactacactctatggcgaaaagagtgtaacagatggcagctctccggaaattgtgttttccgacagctggaaatatcatggatttcaaataaatagtgacaggatatctcttcttagtatcgtgatatatgacccgtattctgaggttgttttcgtagggcataccggcatactgataaagtacagtgactattatttatttgtagaaaagctcgcctttgaacagccctatcaggcaacaaaagtgcatactgtagatgaattgctcaatatcatgtcattaagagcggaatacttcggagaagaaggggaagccggaccatttgtatataataatggagaatatattggaacgttaaagaaaaatattgacatgacagaaaaaacaccctgtaatcgttctaaatagaacgattacaggtagggttgagatgtatttctgggataaacataaaacaattacaggatattatgaactgttatccgccgaggtatgcaaccggtacgggttaacacagatggaatatgatatactaatgttcttacataacaatccacagcataataccgcagcagagattgtaaaggtgaggaaatcaacaaaatcccatgtatcaacttcactgaaaaatttggaaaatgaaggtctgattgaaagaatacaaagcgaagataataaaaagcatattgaaattgttttattagacaaggcagagttgattgcaggcattgtctggatgatagcaggagttaatgttgcgagactgggagtaatatcttatttgaatgcggaatcggatttaggccggctggcgtattcccggagatatttatagcttttttttatttggggcttggcgcagcgctggcatcagcgggagttatttttgccagaaattatctgttatcagaaatacagtttttgctgttactggtacagggataattattttatatttaatttcgggaaatacctatggatatcatatgacaaggatggctgcggctattattatttcatttggctgttatcttccagtaacgttattcagtaaaacaaaaccaaaagtaggactattaatgattccgaagacctgtgcatatatgtggattattgtaatgggattacagattttgtcggaatattaaaaatgcgatggaaaacagcaaaatatcggatgtggctgtagttatacttgtgataatttcaaaggagcacagaacaaaaagcttgcattttgagaacaggcgtgtataataaagctgttataaaacagaccattacgaagtgataaggataatgaaaacggggtgctcgcacaggcgggctgagagtaagcggatgctttaacccagaacctgatttggataatgccaacgtagggagataataagtcacaagcattttttgtgcaggaatctttgcgttggattcctgcacttttttggttctttgcgccgtagggcagcagtaagaaaaatgatatatcacagcggcagattgggggcaccaccttaggtcgctatataaaattaatgcagaggaggattttatgtacacagcattaacaatcgctggaagtgattccagtggaggcgccggcatccaggcagatattaagacaatgaccgccaactgcgtatacgcgatgagtgcggtcacggctttgactgcccagaatacgaccggcgtaacagatattatggaagtaactccaaaatttttggcagagcagctggacagtatttttacggatatttatccggatgcagtaaagaccggaatggtctcatccagtgaactgatagagacgattgcggagaaactgacagagtatcacgcaaaaaatattgtggtagatcctgtcatggtggcaacgagtggagcaaggcttatcagcgaggatgccatcggcacattgaaaagtaaattattgccccttgcaactgttatcactccgaatatcccggaagcagaagttctttccggaatggagattaaaacagaagcagatatggaaaaagcagcagaaatcatctgtaacaccttaggctgtgcagttttattaaagggaggacatcagttaaacgatgccaacgaccttcttttccagaaagaaaaagaaccggtatggtttcacgggaagagaattgacaaccccaatacccatggaacaggctgcacgctttcttccgcgattgcatcgaatctagcaaagggaagggacttagaaacttccgtcaggtatgccaaaaattacatttccggagcacttgccgccatgcttgaccttggaaaaggaagcggtcccatgaaccatgcatttgcagtcgaaggagagtacaaaggatgaataaaaaaagaacttccgttttttcaaacggactaatctggtttggcgcaggcgtatccctggcggaaatactgacaggtacctattttgcaccgctcggtattggaaaagcaatggcagcaatcctgcttggtcatctgatcggcggtcttatgatgtttgcggcaggaatgatcggagcgaaagagcgcaaaagcgccatggaaactgtaaaaatgagcttcggcgagaagggaagtcttctttttgccgtattaaatgtgttacagcttgtcggatggacggcgatcatgatctatgatggcgcacttgcagcggatggcgtgttacatattggaaactgggtgtgggcgctcgtcattggtattctgattattgtctggattttcattgggctgaccaatcttggcaggctgaatacggttgccatggcagcactttttattttgtcactggtactatttaaagtaatcttttttaattcagactttgtgatgctgattacagcaagtgatgacacaatgacgtttggtgcggcggtagaacttgcggtagcaatgccgctttcctggctgccgcttatcagcgattatacaagagaagcagaaaagccgtttgcagcaacacttgtcagtgtgcttgtctacagtctggtcagcatttttatgtacatgatcggcatgggagcggctatttttaccggtgaatatgacattgcacagattatgttaaaaaccggtttcggcgttgtcggacttcttattattgtattttccacggttacaaccacctttctggatgcttactctgcaggagtttccagtgtttccatttcttcaaagattcaggaaaaatgggcggcgatcgttgttaccgtgatcggaacggctgcagcgattgtgtatcccatggataacattacaaactttttatatctgatcggttctgtttttgctccgatgatcgcagtacagatcgcagattatttcattttaaagaaggcagatgccgaaaaatctgctttccagtggcgtaatctggtggtatggcttgccggttttataatttaccgcatattgatgcaggtggatacaccggtcggaaatacactgccggatatggtgatcacagtcattctctgcctgattgtggaaaaagctgcgggggcatcacacaacagaaaaagaggatgaaaaatgaagaaactgaatttaaagaaattgacggtcacagcaatcttagcagcggtagcagtggtgggaagcttgttttccttcccggtattcggttccaaatgcgcaccggtacagcatctggtaaatgttttatgcgcggttaccgtaggaccatggtgggcgctggcacaggcttttattgcgtcgctgatccgtaatctgctgggactgggaagccctctggcattcccgggaagcatgtgtggtgcattgcttggcggacttctttataagtacgggaagaaacttccgtttgcctatctcggcgaggtggcaggaaccggaatcatcggaggaatgctttcttatccggtggcatatcttgtcatggggaataaagcagcggcgttatttacgtttgttgttccgttcctgattagtacctgcggtggaacactcattgccattatcattacgctgccgctgaaaaaatcaggtctgcttggcagaatgaaggaaagtttagaagagtaaaaatgttaaggcgttgctgcatcagtattgcattgatgtatacgccggtcatggtatggagaagataggaaaatatgcggttgttgatcaaacagagagagtttttgtggacaaattcctatgacgtgtatgacgaggaggggaatccatcatccacatttccaaacagctgctatcctggggtgctgtctacgtcatcgacatcaatgatcccgcagatgagctcgacggactgatgcttgtgatcgctatcgatgcggcaaactgcacgcagggagcatcataagtgggtagagcgccacggggcggggcgtgagattgacaagcagatagaaattgacgtatactaaactggattttgaggaaaagaaaggaggacgcaggatgaacggtctgggttatgcaccggtctgcagcagcagtgtattgtcaaaaacatgtatttttcgcgtgtacgggattactgcgcccttttttaagaaggtttagcgtttctgtacatagaaaaatgcggcagtaattccgaaacagtttgatctcacaatggtgtgggatcgggctgtttttttcagtttattgataaaaataaaatgaaaagaggaattacagatgaacgaaaaacagaatcttcgacttaagagaaatgttggactggactatgtccatacgtttctttccaatatgaacatgcaaagctcgatctgggtgttgtatctcgcatattgcgggctgcacctggcacagatcggactcttagagggaatataccatgcgacaagcatcgtgtgtgagattccttccggggcggcagccgatctgtggggcagaaaacgctgcatgattttgagcaacctctgcatcgcggtttcctgcgtgatcatgctgttctcaaaaagtttcgggtggtttgcggtaagctttgccgtacaggcacttggaaataatttaaactccggctcggaggaagcgcttgtatatgacagcatgaagtgcctggggcaggaagaacactacatgggtgtctatggaagactcaatgtgttgatcgaagtggcgcaggggcttgcaacggtcgcaggcggtgtgctggcagaattctcctacttctggtgctatgcggcatgtgttgtgattgcggtgctggcattgctgcctgtactgtggatggcggagccgccgcagtgcagcaaggcagctgatacggcaggcgggagcgcaaaagatgcgccggcggaaggaactccggcacagagaacgatctgggagaccgtgaagcatcattttgcagtcagtgcatgtatcctgcaaaaggatgccagaatcggaaaaatcatcggcttctattctgtcgtttttgcggcgcacacgctgctgtttttctacagccagcaatatttcgcggatttcggctacaataaagtgcagatcagcgtcattatgctgctcgtgggcggcgcgtcctgctttggtgcgctcgccagcgaaaaaatgtaccggcggtttgggaaaaggtgcctgataccggagacggttatcattgcggcggcaattctctgctacggagcagggaaggcgggcgtgactgcagcggcccttatgtgtgccggatttgcgaacgcggcattgtatccgatccattcggactccctgaacgcattgattccgtccgaacagagggcaaccttaatctcggtcgacagcatgtgtttttccattgccatgattgtgctgttcccgctcgcaggagcgtttgcggaccggtgggggttaaagacggtgttgctgctgctcggcgccattttactgctgtttcttttggcagccttttgcatcgaaaaagaaagcttttcaagcgatcattcctgatgtatgatgaaaaaagcgaggtaaacatatgttaaaattagagaagggacgtcctgccgactgcgcgggacgtctgggaaaagaagtccggacgtacgattttctggacaaactgaatatcgaatatgagcggattgatcatgaggcggcaatgacgatggaagagtgtgcggatgtcgacgaagcgctcggcgcaatgatctgcaagaatctgtttctgtgcaaccggcaggagacaacattttaccttctgatgataccgggagataagaagttcaagacaaaggatctgtcggcacagatccattcgtcacgcctgtcttttgcaaaagagacttatatggaggagcttttagacatcacgcccgggtcggtcagcgtgcttggcctgatgaacgacagggaacaccgtgtccagcttctggtggaccgggatgtgctggagggtgactatatcgggtgccatccttgcatcaacacgtccagccttcgcataaggcagaaagacatgtgggaaaaaattgttccggcgctggagcacgaaccggtctttgtgacattggaagaaccacaggagtgagcagatatgaaaaagaaaatgcagataaataagaagaaagaagaacggcggggaacgcaggaaaaaatgtcgaaagtggaaaagacggcaagaccggcgaaagcggaaaaaccgataaaggcgacaagaccggcaaatgcggaaaaaccgataaagtcggcggagcgcgcagatgcggtctgtccttacgcgaagaaatgcggtggatgcgactatcagggcatgccatatgagaagcagctcaaagagaaacaggcatatgtgcagaagcaggtcggaaacttctgcaaagtgctgccgattctggggatggacgagccgtatcattaccggaacaaggtgcacgccgtgtttgatattgaaaaaaagcgtggcagccgtcccggagcccgtggaaacggtaaagctgcaaatggaaagcagggaaacggcaaaaacggaagattagcggcaaagccggcaccgggtgggattatttcgggtgtatacaaagcgggaacgcatgaggtcatcaatatcgatgcctgtcagatcgaggatgaactatccagtgcgatcatccgtgacatccgggggcttttgcattcttttaaaatcaagacatacgatgaggacaccggttacggtctgctgcgtcatgtgctggtgcggcgcggattccacagtggtgaggtaatggttgttctggtgcttggctcgccggtgctgccgtcaaagaatcattttgtgaaggcactgcgggaacttcacccggagatttcgaccgtgatcgtcaacgtaaatgataagcgtaccagcatggtgctgggcgacaaggagagtgtgatctacggaaaaggctatattgaggacacactctgcggctgtatgttccgtatttcgccgaagtccttctatcaggtcaatccggtgcagacggagcttctctacggaaaagccattgcatatgcgggtctgaccggaaaagagacagttgtggatgcgtactgcggcactggtacgatcggcattattgctgcgaagtctgccaaaaaagtgattggtgtagagttaaaccgtgatgcggtgcgcgatgcggtaaaaaatgcgaagtgtaacaacgtcaaaaatattgagttttacaacgcggacgcgggacagttcatggtagagatggcggaataccgcgcggatgcgaagcgcggagagaagagcggagcagacgaggtggatgtcgtcttcatggatccgccgcgcgccggaagtgatgaggcgtttctctcctccgtggtgacgctggcaccgaagcgtgtcgtctacgtttcctgtaatccagagacgctggcgcgggatcttttgtatctcacaaagcatggctatcgggcacaggagtgccagccggtcgatatgttcccatggacgaaacatgtggagacggttgtcttgctttccaagggtgaggtcgactcgaaaaagattcgggttgagttctctttggaagatatnnnnnnnnnncgaatttcaggatggggcaacctatccgcagatcaaggagtatgtgttggagcataccgggttaaaggtgtccaacctctatatctcacagattaaacgaaaatgtgggattggggttggtaagaactataatctgccgaagtccgaggattccagacagccccagtgtccgcaggaaaaagagaaagcaatccgagaagcattcaaatattttgggatgatctaacatcccgcaaaatggaggtttcttatggatagattgatttcttgtgagtttaacatggataccgcttgtgtggaactgaaatttttagatggcagcatgattgccattgataccatcgccgtggagaatgaggttgctgacaatatgtatcaacggtcagaactggattatctaatctacaatgatccggttggatatgcagacttgatcttgaacggtgatcccgaaatttatctaaaaactgtaactgaatgtaaacccttagattaaaactcagccctctgccttttccttggcagagggccgttttttgcttaacagttattgagcatcccttaattgctctacaacactgcatttcgctgcattgtcatacatcatgcaaggaatcagccaccccagcagaagaaataccggaattgtcagcaggacaggcagaatggtgaatcgatactcaaagaaccagaacatactgcccagcatttttcctgcaagaggtcccaccgccagcgacagaataaaggccgccgatacggaggacattgcgtaaaacaatccctcgtagatcagcatggttttgagctgccggttcgtcattcctacagcctgaagcacagcaaattcacggcggcgggaaagaatactggtcatcatggcgttgaagaaatttaagagtcccaccagcccgatgatagcacagaggataccacctaccagaaggaacatctgccggaactgagcaaactcagagcgagccgtggccttgctttcatacatcaagggtgaaaactcaccggcagtgagcttcgatagatattgctctgcttcggcctcgtctgcgtcgtctgctgtgtcgaacaggtagagcatcggaatggccgcaccgccgctgtccctctgtgcggtatccacagacaaaactgtctcatatccaataccaccataacgataactcatggaatacggaagctctaccaaggcgcagaccgtgtactctacatctctggctccatacagtttttcctgaaagtactcctccggtgtatcttcggtgcggagttccccggtgcggctgtcgatatatttcacatcgtccgcataggtggcggtgatcgtgtctcccaccttggggtagtattcaggattgggcagattaccgtagtcatctaaggaaaccgcaatggcaatagcgttattgtttggctccagcataggagaaatatctccgtcgaacacttgcagcttgtcaaacaggctgttatccagagcctcgattctggtatctcccatcaccatatcgccccggtgctccatgcggctcatatggctgtccaactgctcagcactttcgtaccttgcatagtcctgccgcagagcatcctccgtcatccaaagatatacgggttttcgcacagcatatcccgtgccggaaagactggactttgtatttgctgcgatctcttcgatctgttccggcgtgatgaattcatctgccgggttgtaacggaaatagtcgggcgtgctgacgataaaatcggcgcaggtcatgaaggatacatacttctccatgctgaagccgcccacaaaggcacacagtgcattgaacagcgtcaccgacagtgccagagacaccaccaccagcaccgtcttttttttgtttcgtcccagattggcaaaggccatctgatggagcttcgctccccgggtgctgcgctgttttttcttggtctgcatcgcatctgtatatttggtagcctccaccggagaaaccctggctgccattttcccgggcttggagcaggacaaaagcaccgtcagcagggcaaacagcacggagccaacaaagatcacaggcgaagtgctgatggtggtgatgcccgcatccaactgggtggagcgcaagacaacaggcaccagaacagcgccaatgccatagcccaacagcagccccgccggaatgccgatcagacaaagcagaagtgcctgctggcgaatgatgcgtttgagctgccggggcgttgtgccaatggttttcagaagcccgtaaaaccggatatcccccgcaacagagatctggaaaatgttatagatgataagatacccggtgaaaatcaccagcagcaaaaaagctgctatggcgatcacaagttccggatcgagatgcgactccagctgggatgaggtatatccccagttgacgccgatccggacgctgttgggatcggtatagctgtcccatgtgtagccgagatcggtatccacctgctccatctgcccttgaatgtttgtactggaagccatcatgacattcaggtcagtgcggaagggctgtaaacctgttttcactgcctgcgcttcgatatcatctgcgtaatcacggctgatgttgatgtaatgaacaggcattagttcatcatagtcccaatagcccaccagcgtaaaggtatctgttacagtaaaggcggtttgatccttgtccgtgatggaataggaaaccgtgacctctgcgcccagttccggcgtcacgccaagcagctgcaacgctgccgtatccatggtcacctctttgccgctttcgggcatccgtccggtagtaggggtggcatagctccatttggtgcagttggcatccatgtagctgatctctgccggcgttttggaaaagacaccatccgcagtgatgccgatcaccttccgtgcccccgcagactttaccttcgggtgggcggcgatacgttccgcctgctcgggggaaacatccttaaaggtgccgtgtgcatagccgcctacctgccgaaactggtaggtttcatagctggcgttcaacgacaagacaatggtgaacatggacgtaaatagcagcgttgtcagcgcaatggcaaaaatggcgatcagattgcggcgacggttcgcataaagagattttaagctgagctttcgaatacattttctgtttttgacattcatcgtagccacctcccgttagttctgggagacgatccgaccatcttcgatacggataatgcggtctgccatctgcgcaatttcttcgttgtgagtgatcattacgattgtctgggcgaacttttgactggtgactttcaaaaggctcaatacatcctggctggttttggaatccagattgccggtgggttcatctgccagaatgatagcgggtgctgccgccagcgcacgggcaatggctactcgctgctgttgaccgcctgagagctgattgggcagcgcatccagacggtcatctagcccaagggtctgtacaatctgctgtacgaaatccttattgaccttgccaccgtccagctcaatgggtagaacaatattttcatacacattcagcaccggaacaagattatatgcttggaacacaaagccgattttcctgcggcggaagatggtcagcgcttcctcctttagggagaaaatatcctgtccgtccaccatgaccgtgccgcttgtagggcgatccagcccgcccagcatgtgcagcagcgtggatttgccggagccggatgtgccgacaattgcaacaaattcgcccttctttacacttaaatcaactccatccaacgcatgaactgcgttattgccggagccataaatctttttcaggttttttgcctgtaaaacttccataaatgagtacctccatgaaaaaatctgtatgtatgaaaggaaatgatcctttgatacatacagattatcgcataggaatctttccacattctttccggcggaaaatgaaatctaacagttttgatagaattgttgttatttcggcagaaatatggaaaacgtacttccttttcccggaacggaagcaaccttgatataaccgccctcgccggatatgatctgtcgggcaaggtataagccgatgccgaccccttcttgtttctgcacactatttgagcggtaaaagcgagcaaatatcttcgcttgctcactttccgggatgcctgaaccggtatccgatatatcgatccttgcaaacatttcatagcttacggcagaaatagtaatggtgccatgctctgtatatttgatggcgttgtctacgatattagccagcgcttccgctgtccatttgaagtcgaatacagcaaaagcatctgtatcctgcatttgcaaagacaatcctttttcagaagccttggcagtatattgttctaccacactttcaagcagcggctgcagcgctgtcggctggggggagagtgaaatgatcccgttttccagtctggaaagctttacgagagaatcgatcagaaatcgcagcttttccgattgtttgtacagcgcctccacatttgccttcgccgatgcaggcagagtttcctccatcaaaagctcgctgtataacagcaggtttgcaatcggcgtttttgtctggtgggagatgtccgcaatcaaggttttgattttgtctttttcctgcgctatgttttgagaagatgcttctgcggcggaaagatagtgcgcaaacttcgtttccaatgcagatagctggctttcatcaaaattggtttcagaaaaggagccggtcatggcagcgtccagcattctttcgatttcttccatcgtttttctggcctttctccgctcccataacacaacagctgccgccgccagaaaacacagcagtatgatcacaatgccggttttattcatcttttgtcacccagctataaccgattccatagacggttttaatgtatttctgtgcgccaagcttatccctcagacgcttgatcgtaacagacaaagcattttcatccacatattctgcgccatctgtccagacccggtcgacaaggtctccacgggtcatggttcggcctcggttttcaacaagcaggcgcagtaatttttgttctgttttactcaattccacttttgaatctcccacataaaaggtcatagcctcaaagtcaaagtgaaatagatccatatggatcggcgcatttttatggcttgacgcttgctttcgcagttgggtattcacccttgcccgcaaaaccgaaagagaaaagggcttggtaatgtaatcatcagcacctctctccagtccgtctacgatgtccagatcggtgtcgttggcagtcagcagaataacaggaactccgggtatgttttccttgacctcccggagcagctcaagcccactgccatccggcagattgatatccaacaggatcagggatacaccgccgcaaagcaattgctctcttgccgcttttagatcatggcaggatataatctggcggtcatctgctttcagcgctttgcataagccttgattcaagccgatatcatcttcaacaatcagtaattgctccatatatctcactccctcgttattcaaataccaccattatttccttgggcaatttttcgttctcacagttcagaagataggcgattgctctgcttgcaaatttgtttgttttcactgtatcccaatcggcaagcaaaatgacctctgccttgccgttctcaaaatctaatgatatttcgccccattcgccgtcgcagtctgcctgatattcgtagattgcggcggcgattttcttttttcgcttgatcttggatttctgttttagccggactgcatggattgcgccctcggcaaccaacaattccgtcaacttgtccactgcttttcggtaggctcgttctgcaccgctggctgtactgccctcaaacataaccgccagttcttcaaaggtggggcggtctttccatgagctgacacgcccacaggtcatgcaaattgctaaccgtttttcaagcaaggtctgttcccggtaattcagtttctcaaatgcccgctgcaccttttctgcctgtatgccgttccagaggatatcggtatagttccagctatcgtcaagggctacatcctcgcctgtttcctcgccgttctcgtctgtcacatagaatggctgctgattgcggattccacggacaactttcagatattcttccgcaagggcaagatcgcagttgtatttcttggaaaattcgttgaccgcatccttggtattgtggtacagccaagccattgaccgcaccattttgtaattggtcagagaggacaccgaccatttttcttcgcccatgcgaaaacggagcatagcatcccggatgaacgggaaaatgtatgtagcatactctgcacccttggcaaggtcatagtccatcagcttttggagcatttgctcccggcaggagagctttatatctataaatcggtctgtgtcatacagatcgccgccatccacaccgagaaagtctttgatgcgcttgttaagctgcggctcgtagtggtgtaggaagaatgagaaatatatcaaattcttttcctgcaaggcagacaggatatattcgttcagattgcccaccgctggaggctccggttccagttggaagatgcgctctgccgcataaggaatgatgccgtcaccgtgcggattgacagcgtgttttggtatgtatccggtcatgtcccatgaaaaatcactcagcatagcgcacctcctttcggttctttctctatcaatatcgacagtaattatgcatcgaactttttgttagtagtattattttcgtcatccatcatatcacttagcacggcaaaagcttggctcagcggcacagccttagaagtccagtttttcaaactaaacaagttggaagattcatcaaacacatcaaattcgtctgtcccatcagtgattttcttcaagtacaacatttctatcaaatacaaagctcccaagatatttagtacattctcctgctttgcttgcttcaactgctcatagcggttgtgcttgacatctgtaaatgctccccaccattgcaacgactgtgcgggctgggtaatatcccaattcataaacggttgtatttcgatatcgtattcctgtacactgattttttgattttttatatccggtgtgttggtcaaaatatactgtgcatagtctgcaaccgtttttcgatccgttgtattgaaaccgcaaaactctttgaatacagtatccaactctgcccctatggcttgaattaagagggcatatccgttagaaaatgcatcaaaattgtcctcatgtagttctacaaactctattgattcaacaaaacgcttttcgagcattaagtagtatttccaatgattctgactaagttcttttctattcatgtttgtccctttctttgtatatttttgcacttgcttcctttttcaaagccgcctggtccatttctttttcataagctcccttggcataggctacattgctcaatgcccggagcatcttatcttttgccagctttttcataacctctgcaagatcagcgtccagagtaccacgcttcacatagcggtttatggtgttcagtcgtttctcataaatctgtttcaccggatgatcgtccgcaagctcccgttgttctctgcctttcaggttgccgatctgccgacaggtgcggtgcagcttgtcccccggtgcatagccgccacagtatttggtgtgccgtgcgttggtggtcagaaaccacttgccgcagattttgcatttctttggtgcatgaccaacacacaggccctcaaagagatcagaccggaacatccctacaaaggatacatagtgcatccgcttgaccagcttcgcaactttttcgccgggacggatgacggatacatactgaacggattcgaccaggtgaagacgatgaagaaagaagatgccgttgccgcaggactttacaaggtcatcggaaaagagatcgacgatcgttacatggaggagctgaagaagcagtcgatccatccggaagtcatcaaggagatggcgaaggacattaagattgtatacacaccgctccacggaaccggtaaccttccggtgcgccgcgtgttaaaggagcttggattcgagcaggtgtacgtggtaaaagagcaggagctgccggacggtaatttcccgacggtatcctacccgaacccggagtctccgaaggcatttgagcttgcgttaaagctggcgaaagaagtcgatgcggacatcgtgctcgcgacagacccggatgcagaccgtcttggcgtgtactgcaaggacacaaagacnnnnnnnnnnnnnnnnnnnnnnnnnnnnnnnnnnnnnnnnnnnnnnnnnnnnnnnnnnnnnnnnnnnnnnnnnnnnnnnnnnnnnnnnnnnnnnnnnnnnnnnnnnnnnnnnnnnnnnnnnnnnnnnnnnnnnnnnnnnnnnnnnnnnnnnnnnnnnnnnnnnnnnnnntgagaacccggcgctcgtggagacgatcgtgacgacagatatggcaaaagcgatcgcggcagcctacaacgtgaagttgatcgaggtgctgaccggatttaagtatatcggagagcagatcaagttcttcgagcagcagcatacgtatcactacgtattcggactggaggagagttacggctgcctggcaggaacctacgcgagagacaaggatgcgtgcgtggcggtcatgatgctttgcgaggtggcttcctggtgcaagaagcacggcaagaccctgtgggatgcaatgctggatatgtatgagaagtacggctattacagagagggattggagacgaagaccttaaagggaatcgacggtgcggcacagattcagtcgatgatgagtgagtaccgcacgaacccgccgaaggagctgggcggtcatcgggtactggcggtgcgcgactacaaggaggacaccagaaaggatcttgtgactggcgaggtgacaaagaccggactgccggcatccaacgtactttattatgaactttccgacaatgcgtggtgctgtgtgcgcccgtccggaacggagccgaagatcaaatactactttggcgtaaaggggacttcccttgcagacgcggatgcaaagcttgcggcattgaaagaagatttgttaaaataaaagaaaacaaaaaagaattatttagcaaaaagcagcatggattggaagcgcagctgacaatccatgctgttttttgacgttttcccgcatttctactgtggtgtttgaaggataccggaattgaaaaacgcaggtgcctgtgttatgctttaataaacgattacaaacgacgggaaaagaaaaaagaacacagaggaaaactgcgatgtatcagtatggaaatttgtcggactttgaatttgaactgttgtgccgggatatcatggagcggaagcttggctgtccgctgcgctgttttgcgcccggcagggacggcggcgtggatattacggagacgaggttatcgggatgtcatatggtgcaggtgaaacattacatcgacagcccttatcgcacactgctttccagtttaaagagggaactcccgaaagtaaagcaaaaacagccagagcattattacgtatgctgcggaaaaaagctgacggcacagaatatttccgagatttatcagcttttttcgggttatatggacgatgcggaagcggttgtggatctgatggagattgaccgttttctacataaaaaagagaacgcggatattctggaacggcattataagctgtggctggaatcgaccaatgttttagaacggcttggcaatcaggatatcgcgatcgactgtgatgcctttttctatcagattgaaaaggagcagaagctttttgtgaagacaaagtattacgaggaaggcagacagattttggaaaacgagcatatgctggtgctgttgggcgatccgggagttggaaagaccatgttgaccaagatgctcgcattaacttttgcggcggaaggataccgtattcgctatacgacaaacggcgagctgtcggatctaaagcgcgcgctctccgccgacagggaacgaaaggaactgattgttcttgatgactgcctgggacagcattattttaaaatgcaggagacgaaagaaaatgaactgctggcgctggtcaagtatatcatgcgcaacccggccaaacttctgattatgaattcccgtgttacgatttttcacgaagcaaaggaacgatcgtgtgatttccggtattttatggaggatgagaatataaaaatccgcaagatagagatgaatgggctggatgaggaagagaagggcaggattttctataatcacctgtattttgcggagattccgaaggaatattaccggaatgtttatgaggacagacgttatcgggcaatagtcaggcatgtaaattacacgccacggttgattgagtttgtcaccaaaaagaaaaattacgagcaggctgcaccagatcattatgcggcgtttattatggactgtctcgaaaatcccagagaactatggaaggatgaatttacgagaaagcttggaccggaggatcgggcgttgctgttgacgttgtattctctgactgatacgagtgtggaggaaccggttctggtacgggcgtttttaaagcgtctttccgacctggaagggatggataccacccgaaacctgtatgaggaagcgttgagacggctgacagattccatggtgcagatgatagaacagaacggcagaaagcgtattggcgtatgcaacccatcgatcaatgattttttgaaaaattatatccgggagaatccgatggagcaggcaaatatgccggcatatgcgacagagtatgtgcagctggagcggatctgccccggctgcgtggaagaacttgtccggaatgggcggatttaccagtatcattttcgtatgttggaagcaaagcgcggtaaaattcttggagttatttgcgataacagcatacgggatatgtgtcatatggagttcgtgcaggcattcctggaggaaccggggagctgctacaccaaaaaaggagatagaagcgaagaaatcctgttcgctttgctgcaggaaaaaatggacgtgttctatcatacaagagcgaaactgaatcaggagacgctggaagattttctgatggaacgggggctgtgggagtatcagacgattgcacgggaggcgaagaaaaccggcggtgaatggctgtttacaaaatatcggaaaagttttgagagaggattgcaaaatgctgttgaaacgtatgccagggacgtggatcagtcggactattatgatggatatgatgtgaatacagcgatagaggagagtactttttataatggtgaagctctggaatgtgatttttcaagtgtagcattggagtgggaggaatacatccgcgaagacatttataatgagatcatggggatcgtaaataaatttccggtcgagattgccgcacagattgtgtatgaccctggagatgcggatatcagtaccggcttgattgagtcttatctggaagactggacgaagccggatgactacaacgatgatcttggaaggcttgtgccgggcggaaatgaaactgccggcggtgggggaatgctggatgtgatttttcggggaaaaaggtagcctggctgccggctttaatgggaaagggaagcactttgtgccagaaatgtgaggaatttatggaaaataaaaactcttgcaaagaaaattttgaaatggcaaaaacagagctgcaggacatggaagctattgcagattttttctcaaatccgatgataaaaagcggaatggagatgctgggtgagataccggggatcggcagtctggcaaagaatcttctggaacaggaggttgccgggtttcagaaaaggaaacgggaagaattcctaagttatattacagagtcgggggagctgattgcaaaaagtgacgtggcagatgtcccgtttctcatggaactggcgcgcacgctggaggtattgaaccggctggcaaccaatgaaaaggtgctgtatattgccaatttatttaaacatacatttttgctggcaggggacagagacattgacctgtatgaggagaatctgaaacggctggaagaactgtccatcagagaaattacaattctggcaaaattacatcaatataaatacaacaatgaagcattttatgaagatataagaaaagattgcgggatcgaaaaagacgaagtgaaaaatattctgtccgctgtcacaagaaccgggttttgtaaagaaaaggtggggacatatcttggatatgaaggagacgtatattatacaacgtcactttttgaaagctttttaaaatgcatcggggtatgtgcggaagaaacagaaagtgagagagacggatgagattacggacagagggggaaatgagtagaagtttgacattagaatttcgtgatttcgcccaatagacaatcaaatgtaatccggtctataatactcccataggcaggcacttcccacagaggaggtacccgtgtatgggagaaagttttcaaaaactgaatttgacaaatgcgtacttgtttgcggcagccatgcaggatgaggaaatctgcagaaatgtattggagattgctttgaataagcggatttccagagtgaaggcacacgtagagcaggtgttattccttgacagcgagtttaagagcgtacgttttgatgtgtatgcgtcggatgaggaagaagtcagctatgacgtcgagatgcagaatgacgatacgaagaatctgccgaagcgatgccgctattatcaggcggagctggatgttacatctttacggcccggggaggattatcagcagttaaagccaggctacattatttttatatgttcgttcgatccgtttggaaaaggaagatgtcagtatgtgtttgaagagtactgcaaggaagcggacattccgcttggggatgagacgcagaagatcttctttaataccaatggcacagatacggagaatgtgacaccggagctgctgcatttgtttgagtatctgaagcagagcacagaggaagtagctgtcagacatcaggatgagaaaattcttaaaattcacgaaagagtgaaatacctaaagcgcgatcggaaattggaggcaggctatatgacaatggaggagtatatccaccaggaagcagagcgaagggcaaaattgatggcagagtcaatggcggaatcgatggcagagtcgatggcagagtcaatggcaaagtcgatggcagagtcgatggcagagtcaatggcagcatcaagagtagcacaaaacatccttgcactgctggaagatcttggaacacttccggatcaaacaaaagagcgcattgcaaaggaacagaatgaagatgtgctatctgcgtggcttaagattgcagcacgcgcggattctattgaagagttccagtctaaaatgtagagacagatctgtctcattcttgatcggtagtttcaaccgataaaatctacaaaaataatttcgggacgtgcctgtcataagaaaatatgttatttatgaaaatgggcaaaatggtttcatccttgtattttcggagtgatttcgctatacttaaaattgcgtttaagcaatacaagagtagaagaggaaatgaagaatgcaggagaaacgagatatttttgaccggatgatggctttgccgatattgaatatctttgagccattttataaaaaaaacaaggaagtattgctgtatttgttttttggcgggctgacttttattgtcagcattgctacttatgcggtatttaatgtatccatggggatcaatgagctgattgccaatgtgatgtcgtgggtgctggcagtattgtttgcgtttgcgacgaaccgtgtgtgggtatttcaggcaccaacacatacgatcacagaatttttaaagcaaatgctctcattttttggcgggcgagtggtcacactggtgatagaagagatcattttgctggtatttattacctggctgggctttaacagcatggttgtgaaagtaattgcacaggtgattgtgatcgtgcttaattatgtaatcagtaagttttttgtcttttcagacaaaaaatagccggcaggctgccggctggttatttttgcaggatgcgggtgcgggctggaggatatatatttcctatagacgtataataatttggaaaggatagatacagggagataaaaagatgtcaaattacttgatcggagattatatccgggataccagattgcggcggggatatacacaggagcagcttagctttggcatttgtacgacagcgtcgctgtcccggattgagaccggtgcacaggcacccggcaaacatattttggacgcgttactggaaaggcttggaatcggagataaaatattcgatgttctggtaagcaaggatgatatggtgatctttgaaaagattcaggatgtcacgaggagtattgcaagagctgattatgatcaattagaaacgcagattgaagaattggagcagttagtagagaaaaagaacaggagcaatctatatctgcaatatttaacgtttgcaaaaggaatgctaagatacggaagaggcggaacgtatgaagaagtagtcaaattgtttatggatgcgattcatatgactttgcccaattttgatggggtaaccccaaatgaaaataatcttttgacatttcatgaaattgcaattatagataacatagcaacaatgtatgccgaatagaatatgatggagcaggcactcaggttaggatattggctgaagcaatatatggagataaaatttgttgacggaaaagaaaagacagcaagatatccaatgatattatataatttatgcaattggcttggaaatatggaacgatatgaagaggcaaaagaaattgcggaaattggagtgaatttttgcattgaatatggaaatctggtcgcgtttccaagattactatttaataaggcgtgtgcattggctacacttggtgataggaaagaggcgaccagtattttcaaacaatcagaggcaatatttgcggctactaatcaaatgcgtatggcgaaattgactgccgatttatgcaaaaagcattacggcatagagatttagtagcactcgtgaagatcccccaaaaagaagcatgcatttaccccggcattctctgcaaaggatgctgcaacgcccggtacggcggctgctgcgaggaccagtgtaagagctgcaatcagaatcatttttttcatttgtgaagtctccttttcattttttcttaatgttaggagtacttaccgacaaagaccattcgatctgacgtaaatttttatttacgtcagatcgaatggtcttttggaaaaaattgggataaaatatacacatttaagacaaggcaagcggtaaggtactatacaaagaaagaagaaaaggggagtaaacggatgatagaatgtgtcatgctggatacactgccggagaaggcgaatttaattttgaatattttgtgggatcggaatcatccgatgtcagtgacggagttgatagaggcgctaaaggaggagttttcattgaattgtgaaaaggaggaggtgcaggactacttgcggttcctgctggcttccgactatgcagaaaagaagcgcaaaggactgaaggtgctgtatgcggcacttggatcggagtataccttataagagtggtcggaacacagttgggatctgaccttagaacagaatagaggcggccgtttttgactcttcccagataagtggaattgtggtatcatagaaccagtttatgttaatctatttacgttggggataaggatgaagaagaaatactatttggaggcggtgcgcattacggcggtgctcttggtgatgtataatcactcggcaccgtttatgtcgtttgcgacacagcatggcgtacagtatgcggtgtcgttttttctttcactggtttgtaaggcagcagtgccattgttctacatggtttccggtgcgcttctgcttgggaaaaatgaaagctttggggaacttgcgcggaagagaattctgcgtattgtggcggtgattgttattttttctttgctgtattacctgaaatttgctgtgcggggacaggcgtcggtgtcgccgatccgttttctgcttggattaccgtttgatgtggcgtttctgccatactggtatctctatagttatcttggaattcttgtcagtcttccttttttgcgcccgctggcacagaatatgccgaaaaacgcattctggtatctgattgcgctgcagattgtaacggagtccttacagattacacttggctttttcggatatcatacgctttgcggttatttcagtgtggcgggagtattgcagacgactttgttttatccggtaatcggatttggactggaccggtatctgaaagaacagtcgtttttcggatggaaaaatatactgcgcaatctggcatttctggctgcagtggtaattagctggcggctggtataccgggactggcagacaaatggaggcacttaccgggagatgtatctcggcgtgtggatgcctcttatcacgcttgtgatttttgttgatttaaagcttttgttccagagagaggatctcccggagggactgaagcgtttcctgtcgatggtcggcggctgtgtgttcggagtgtaccttctcgacgggtttatcggggcgggcggccgcatggatgtgatttatcagaagtttatgccgtatatcggatatctgccggcatttttgattgagatttttgtgctgtttgggatccgcgtggcattgacatgggtgatgaagaagctgccggtgttccgcagattattgtaacatacgaaaggaaaataaaatgttgatttcactaattgttccctgctacaacgagcaggaagcattgccgattttttatgaggagtctacaaaagttctcgcggggatgaattgtgaatacgagtttctgtttgtcaatgacgggtcaaaagacgcgacattgtctatcttaaagggactggcagaaaaagatgagcatgttacctacctctctttttcaagaaattttggcaaagaagcggcaatgtatgccggatttacgaatgcgaggggggactatgttgcagtgatggatgcggatatgcaggatccgccggcacttcttccgcagatgtttgcgatgcttacatccggagagttcgacagtgtggcgacacgcagggtcaaccgcgagggagaaccgccgatccggagctggttcgccagacagttttaccgcattatcaaccggatttccgatgcggatatcgtagacggtgcccgtgatttcaggctgatgaagcgggagatggtggacgcgatcgtggagatgggagaatacaaccgtttttccaagggaatctttggatggattggcttccggacatactggctgccatatgaaaacgtgaaccgtgtggcaggagagacaaagtggaatttctggaagctgttaaaatatgcgattgacggcattatcaatttttcacaggcgccgcttgccgtggcatcctggttcggcatggggatgacgctgctttcctttatcgcggtcatttttatcgtggtgcgcaagctggtgttcggagatccggttaccggctgggcatcaacggcgtgcatcatcacgttcatcggcggcgtgcagcttttctgcatgggaattatggggcagtatattgcaaagacttacatggaggtaaagcagcgcccgcattatattgttgcggagagcaaccgtgccgaagtgactcggattaagtagaaaaagggcttttacagcgtcttgagatatggtagaatgaaatcagatatatccgcagatctgactgcagatatattccggtagaaaataaagatattgagaggtagacattagtgaagaagagagcagttacattattgacactgcttgctgtatccgccagccttatggcatgcggaggaagcgatgccacggagagcagcgcggagaatgacgcagagcagattgaggcagaggtaacagggcagacggagaatgcggacaccgaggaagaggaggttcttccggaaggaaaataccgcagtgagctgacgaacgagctgattgatgaaagtctgaaggatcagcgcccgattgctgttatggtagacaatgaatccattgcactcccgcattatggattgtcacatgcagatgtggtatatgagatgatgaacagtacgctgaacggacgcattacacgatttatggcgctgtttaaggattatgagagtgtggatcagattggaagtatccgcagcgtcagaccgacgaacgtgatactggctgcggaatggaatgccatcatctgtcatgacggaggtccgttctatgtggatgagtatctggacgaggcatgttccgatcatttcagcggaacattttcgcgtgtggataacggcaagtccagagaatatacagagtatattctttccggggacatggacaagaacttctccaactccgatgtgtcaaaggattatacttcctattatgagggagcacattatcagttcgcgaatgagaacaacccggttgatctcgggacatcttatccggatgatgcgattgatgcgaatatggtagatcttccattcccgcacaacggatcttatctggagtacaatgcggatgatcagctttactattattccgagtacggcaaagcccatgtagatccgggcaatgacaacgcacagctgtgctttaagaatcttctgattcagagctgcggctatacacagtatgacgaacacggttatatgatctttgactgcatcagcagtggttacggctattacgtcacaaacggcaaggcgctctatgtatcatggaagaagaccagcatgacgtctccgacacgttattatgacgcacaggggaatgagattacgatcaataccggaaaaacctacgttgcattagtacctgtcgatgactgggaagatctggtgattgaataagtcgggtaaaggatagaaagatggaagaatttttaagttttatagcggacatattggaagtagataagaatacactgacactggagacatcccaggatgatgtggagacatgggattccctcatgcagcttcgtctgctcggtgagatcgaggcaaaatacggtgttatgataccgatggagcggatctctacgatcaagaagctgaacgatttttatcaatatataaaggaatcataaaatgcggctatcaattttgtccaacgtgaatctggacatgctgtccggacttttaaaaaaagagaacgaagtatttcagacagacgggtatggagagtggatcacgtatgcacttaaaaaggacgagcgtctggcggcgtttgcgccggaatgtctgtttttactgctggatggaaatgccctgttagaagggtgccaagatatgggaagtgtgaagacggtcttagaccgctcggagcagtatatagagaagctggcggagaattactctgccagctatcttgtcgtatcgaccattgatgtccggccggaacatatcggtgcgggagatgcaagtgatctggcacaggcatccggcgcctattgggatacgcttctgaccgggctggcggagcggcagaaaaatattcaccgttttgaactgcggcgtctgatcgaagattatggaagaaaacagttttattccgcaaaattctggtatatgggttccattccttacgatatgaaagcgcttcatctgctcgcggaggagatgcggcatgtgatggcgaggctggtgcgtgttcccaagaaagtgctggttctcgatctggataataccctctggggtggtgtgatcggcgaggatggaccggaaggaattgtgctcgacagtgcacacgagggagccatctatcaggatacccagaaacagatcaaaaagatgcagcagcagggagtgcttctggcgatcgcgtccaagaataacagcgaggatgtgcagagtgcatttcgtgagaatccacatatgatcctgaaggaatcagatttttctgcgatctatgcagactggaatccaaagcccgtcaatattgggaaaatagcggaggaattgaaccttggtctggactcgtttgtctttgtggacgacaatgaggcggagcgcgaagcgatgcggatccagcagccggaagtgacagtcgtggatttcccgacagaccttacgacgctgccggcggtgatggcagaagtctatgagaactatttcttcacatggcatctgacagacgaagacaaggcaaagaccatgcagtatcagcaggaacgcgagcggagaaaagaacgtgagagcgcggtatcctatgaagattaccttcggtcgctgcagacgacgatccggctggcaccggtaaacgacaataccagggagcgcgccgtgcagctgatgaacaagacgaatcagtttaatacctgtacactgcggatggatgaactggcactggagcattaccttggcgaggagggaggtcatctgctgatggcggaagtctccgacaagtatggaaacagcggatgggtgagtgaatttttgtatcatcaggacggcgatacggcagtgatcgacaattttcttatgagctgccgggtgatgggacgcaaagtcgaagatgcgatcctggacgccgtacttaagaagcttcaggcagatggaatcaccagggcgacggcggcatacaaaaagacggcgaagaacaagccggttgaggcgttgtgggagcaactgggatttacacaggtttccggggatgaggagcagaagcagtacgagcgaaagcttacctcgcttcctgagacagagcagattcatactgtggtctgggatgtgtaagatagtgtcgcagcgatcagaataaaaaacagcgcgtagatgtttcgcgcggcagaatggagagagagatggcaacaagtttttattcggatgaagaattacaacagatgggatttgcccatgtgggacatgatgtgatgatcagccgtaaggcaagcatttacggtgcctccaatatctggatcggcaatcatgtgagagtggatgatttctgcgtgctcagcggtaagattacattcgggaattatatccatgtggcggttaccacgacattgtttggcggaacggcaggcattacatttgaggattataccgggatttcatcgcactgtgcagtttatgccgcatcggacgattactcgggagattttatgacgaatccgacggttccggagaagttcacgaatgtgattgaggaaccggttgtgattaaaaagtactccaacatcggagctggctgcatcattctgccgggtgttacgattgcggagggatgtgcactctgtgcgatgacgttggcgacgaaggatacgaagccgtggggaatctatctgggataccagtgcatccgcatcaaggagcgaagccagaagatgctggaactggatatatcggaactggaagccgactaggcttccaccagttccagtaatccgatttggagatgatacaggaaagcaacgcgcctgccgtcgaaagcacatgcgggagcgggcgggattgtgagaagaaaacgcttttgctgcaactccttgatgtcatcctcaaaacggctgcttgtatagcagatgtgatacggtgtgttcccactcttctttaacgtgccgtcgaccggcgaaggaagtgcgggatcgagcggcgataccagctcgatgcggtaatcacccagacgaccgaacgaaataaaaatattgcgatccgtatcgtttacgaccggatcaaaaacataaccgagctcttcaaaagcctgtctggatgcgtcaatatttttgactgcatatccaatgtgatctacattcatgatgtcccctcttattctttaaaatcaaatacagccgtctaccagtagcagccgttatccagtttgtttgcaaagcgtttgctcggcgcttcggtcttcggtgcgcgcacccagtattcattataatacttgctgtagggcgggtagttgtcccagcgggcgcctttgatgccgaacagaacctgaagggcaccgccgtactgaatcgcctgtttgccggcgcgcttgaacatgcaggcaagatcgaatccgaaggtgctgcagctaagcagggcaatgtcaaagtcaatcttcatcgcctcgtcgtagagatactggagagcgtcaaaccaggtgtcgaagtcatcgtcctccctgtctccgctgaaccatacggattttaatgtcttaagctcaaaagaaggaagcattttcctgccctcatagatcttgtcgatcttcgggtactgttcccggatggtatccacgaaaggactgatgacgagcactttttttccttctaacgccatcgtccacggtacatcatagagaatcgtctcgatctgttcgagacggatcaggcgggaattctggcagtaggagcggatcagatattcttccatcggatgatcctcaaagtatgccatgatatcgacgtccctgcagtcctctttggtgagattgacccaccgcgcgatctcgtccatgtccttgtggaacagcgtgtacatgttgctctgatggagtctgtcgtggtgaaacagctggtattcgtcaaacagctgcatcagggtaaactcggcgcttccgagacggcacagagcgaacggcttgccgcttgtaatcatctccttgatcagatggttggcctcctcgtcggaaggcggcattttcccgagaaactttgtgtgcatgatgctgtacatgccaccgcgcttggcgcggaacttatgatgcagatgttttaagtaatagcgcagatataagaatcgttttttcataaaaacctcatattaaagcaaaaataatttgttgtgcggatcagtccatcgaaataaaccagtgaacaatccgctgacccgtacgaataaggagcgcaccgcaagcctgcagaaaggcggcgatgatgccggccagccacggctcgattcttccgatcgtcagcttgcgcagctcattgcagactgcggcaagcagcatgacgaggagcacatagccgcagacaacaaagaacagataccactggccggaaaatgcattcagatccagatagcgtcccagcaggctgcggatgacctgatccagcacgtagatggcgagcacattggtcgccgcgcggttgatgatccggctctgcagcgagaactcacggaagagcaacagcagcaaaacagcggtaaaaataataaagatcgaacaatcccgcgaaaaagtgctgtagatgacaccctgatgcagggtcagcgctccgtcggcgcaaaagatgagcgccgtggatcctgtaattccgaggagcagctgctttttggaacaatgcccggtgtgatagcgcgccagatagcgtcccagtagatagatcatcacaaaatgtgcaagtcccttgccggcatcctgcatcacatcgtaggtcgtgactgttggaatcaggctgaagacgagtagcagtaaaagaagcagtctgcgaaaatgctctctttccagccgttctgccatctgattgagaaacggcgccaggatgcagagaacaaaatagcaggtgatgaaccagtagcgtctcgacaagaccggaatgcaggacttgatcagatccttgacaccgaaatcgccgagtgccacagtgccgaccaccgtgaagaagatcaccatcaggtctaacccgatcagcttctttaagtcaaaacgtatgccgaaatagcccgaaagcaggatgaaacaggtaacgccggtgttgaacagggagttggcaaagacgttcgccagcatgttgccgggcgaagcggcagtgtcaattcctgcaaacgtgtgcattaccaggattccgaagatgcaaagcaggcgcagcagctcaaaattggaagaacgttcatgcttcatggtgtgatctcctgtcagttgttggaagccttgctggctttctcggcgcggcggattttgatgcgctgctggaacctggtgttcccgtgcttgatgtccgcaagatgaccgcgtatggtgagcagataggtgtagaatctggcgccgaaggcataatcctggtgctcatagattccttccatgaagatcttggtgacgcctacgaaatgaaggcataacaatccggtcttctggtgtccgtccagggtgtagcagtaaggctttccgtcttcccagtgcagcttcttgacgccgagacggcggttgaactcgtactgtccttccagatatccgtccggaagcccgatcgagttgtcgaagacgcagtggttcgcatcgtccatcagaagatttaagaattccccctcaggaagagtctttacccacagataaagcagtgacatttctgcaacaccgccgtagatctggtatttctggtggatattccatttttccatcaggacatccatgtggttcttgtacatatcgatacagtaatccgtgaattcgatcagtccctgcttggtaaaataggcaacacctgcgcagaccttccatttgtagccgttgcctttccagaggacggcaatgtcctgctccagaggagactcagctgccatcttgcagtggcggaacggctcgtaagtgctgacgtttgtatagagaagaatatcactgtccataatcacgcagttgtcgtatccatagcggtcaagatattccagaatgagaaagaaacgccggaaaatgccttccgcccatgcctgtggataaggggagaggtttttgaaaacactgtggaacgctttccatttgtctgtgatgaaatcgttggcatcgtgccagtcgtcgcaccagtccttattgtactggtcgcctaaaagtacgactttttcgttgtacttttttgcctgtgcgatgcagtatcttaaatattcctgattctttttgccacctgtctgcggtttttcaccggtctcatggtgtacaataacgggaatgatatccgacataataagtctccttctcatataatattggtgagtcatcagtatcttctattatatcgtagcaaaaaagcgtgtcaagcaatgattgcggattgcgcccgtggttgacaaggaatgtgtttgaatttatgatggtataagaaaataagggggtctacgcaatgaatgacagagtggtatgcgtaatgtctgttggcgcaggaaaatatagaaaacaatacgaactggtgcgggacaatctgatggcttatgcgaagaagtgccatgcggattttcgctttatagacgactatatcgacaaggacaaaaagagggacatctattcacagaagcttctgataccggactatctgcgggaatacgagcaggtgcttttcctggatctggatatcatcatctcgccggattgcccggatatttttgcgcttatgccggagaatatcggactgatggcggaggtcaatccgcgctcgtccgcgcgtttccgcaaaatctatgcggacaacgagcgcattttaaaagagacggtggaggattattttacgtcgcgcgggtttgcagcggcggatggtctggtcggcaatattaacggtggcgtgttattgttccgtccgcgccttgttgccgacctgttccgggattactacatgtcgatgaagagccagggcgagaacacggcgtttgaggaagcgccgatggcgtattacacccagacgaaggggctgtttctggaactggattaccggtttaactgcatgccgtattttgagatcggcaatccgtatgcggacaggctgtatgcacttcatcagaaccggctgtacggaaaagccgagcatgtcctaagccggcttacaggagaaaagcatatgctgcttctcggtgcgcactacaagctgatccgccgcctgtttgacgacggcgcctacatcgtgcactttgcgggcggatactggaacacacatttatataggaagtgtatgaaacatctgtggcgctgaatttcttaagaaatcattagaaatgcgcggaaaatggcgcaaagattgacaagaagttgcatttttattatcatgacagggtatctatttctgaaaatgcaggataggactgcccccgcagagagctgcgggagaggaaaggcgagaaaatgagcagaatattggtaacacgttcttccatgccggagtatgaagaatatatagaagagattaaggatatctgggacagccactggctgacgaatatgggtgcgaagcacaatgaactggaaaaagagctggaaaagtatctgaaggtggatcacgtttcccttttttccaatggacacatggcgctggagcttctgattcaggcactgcatctgacgggagaggtcattaccacgccgtttacgtttgcgtccacaacacatgcgattgtgcggaacgggctgacaccggtattctgtgatgtgaatccggaggactacacgatggatgtctccaagatcgaggcgcttatcacggacaagaccagcgcgatcataccggtgcacgtctacggcaatctctgtgatgtggaggcgatcgaggcaatcgccaaaaagcatcatctgaaagtgatttacgatgcggcgcatacgtttggcgttacgtacaagggacgcggtgtggcgacgttcggggatgcgtccatgttcagcttccacgcaacgaaggtgttccacacgatcgagggcggcgctgtatgctttaacggagagcagaacggactgaaggaggatctgtacggtcttaagaatttcggaatccgcaatgaggtcgttgtggacgcggtcggcgccaactccaagatgaatgaattccaggcggcgatgggactttgcaacctgcggcatctggatggagagatcgagaagcgcagccgcgtggtggcgcgctacagagagcatttaagcggtgtgccgggaatcaagctggtacagccgcagaaggatgtaaagccgaactatgcatatttcccggtggtgttcgatgagacagtgctcggatatggcagggatgatatttatgagatgttaaagcagcatgatattttcaccagaaagtatttctatccgctgacaagcgaatttcaatgttacagtgacagatatgatgcgaaggatacgccggtggcgcttgagacgtcgaagcgtgtgctgacactgccgctctatgcggatctggatctttcggatgtggaccgcatctgtgagctgattctggggtatcgggcatgattattgtaaaaatcggtgacggcatgggcaaccagctgtttaattacgcgtgcggatatgcggcggcgcggcgggagaatgatacgttaaagctggatacttccgaggcggacaattccaccctgcgcgattttgaactggataagtttcatctgaaatatgatgagcgggaaagttttccgaaccggacggtctttcagaagatttacaaacgtctgcgcaggaacctcaagtaccgcgtcatcaaggagcgggatctgcatgcggtggatccgagagtcttccagaaaaagagattccgcaataaatacctgcacggttactggcagcatacgggttattttgaaccttatttaaaagagattacagatatgatgacgcctgcgtacgggcagagtgaacttgtgaaaaagctgtgtgcggaatttcagacgacggacacctgtgctgtgcatgtgcgtggcggagatattgtgggtccggggagagctttctttgagcgagccttagtgcgcatggaaaaggagcgtccggggcttcgctatcttgtgtttaccaacgacaaggaggcggcgaaggaagcgctcgagggagaacacacagagcggaagatgacctatatctccgaactgggagcgttttcggatatcgatgaattttttctgatggcggcgtgccgtcaccagatcatatcaaatagttcgtattccacctgggcggcttacttgaatccgaatccggaaaaagtagtgattatgccggaatataagggctgtgaacagatacgtttgaaggagtggattgttttatgaatttggtaaagagcgtctttaaggtgtttgatggaaagcagaagagaaagttgtttggtatggcatttctcattctgatcaattcgggagtcagtctgctcggcgtgtccgtgcttctgccgtttatccaggcggtgacagcgccggaggaactgcttgcgaaccgctatgtggcggcattttacgagtggatggggatggagaatcccaacgagctgatcacggcgatagcgatcggaattgtcattgtctatctggcaaaaaatgcgtttattatttttatgaataatatgcagtatcgtttttcctactacgggaaaagggagatgcaggatcgtctgatgaagtactatatcagcaaggactatacgtttttcctgaaccataacagtgcggagctgatgcgcgacatcaacaatgatccggagatgttctatgcagcggtattaaatatgctgcagctggcagcggaactgtgcacaagcacaattttaattatctttctggtagtgacagatccgattatcacgcttggtgtggcacttgcgatgatgctgatggtgctgcttttcatgaaaaagttaaagcgcacgctggcgcgcttcggtgatgagcgccggaaatacaatgcgaacattattcagtgcatgcagcaggcattcggcggaatcaaggagatcaagattgcaaaccgtgagagttattttgaggaagagttccgcaagcagaacggactttacacctacgtcatcaagcagaatgcatttttaagttccatcccgaagccggtgatggaagcgttatgtattgcgggtctgatgatcacgattgcggtccgcatcaatatgacagagtccgatccgacccattttgtcggcgtgcttgccgtatttgcggctgcggcgttttacctgcttccttctgccaacaaaatgtcggaatacttagcgtcgatcattcacaacggcgtcgtgatccacaagatcggcgaggagtacacgaagatccgcgatctggagattgatctttccgaggagcgcgattatccggcgatggcacttgagcgtgcaatccgcgtcaacgatatgacgtttacctatccggagatggaggagccggtattgtcccatgtgaatgtgacgattccaaagaacagctcggtggcgtttatcggaccgtccggagcgggcaagaccacgatggtggatctgatcctcggggtgttaaagccgcaggagggacagattacattggacggtgtcgatatcagcacatcgtaccgcggatggcacgataagatcggctatattccgcagacgatctacatgctggatgatacgatccgcaacaatattgcatttggaaaaaaagaaggaatcaacgacgaggatgtctgggcagcactgcgccaggcacagctcgatgaatttgtggagtcgctcgaggaggggcttgacacggtgatcggtgaggcgggtgtgcgtctgtccggcggacagcgtcagagaatcggaattgcgagagctctgtaccgcaagccggaggtgctggtgctcgacgaggcgacgtctgcactggatacggagacagaggcggcggttatgcaggcgatcgacagtctgcagggtaagatgacaatgctcatcattgcgcatcgcctgtcgaccatcaaaaactgcaacattgtatacaaggtggagaacggaagtgtaactgttcaggacgcgcagtagagaagaaatgagggaaaatatgatcattattgaaccgtgtgcaggacttggaaataagctgcttggcatgtcctcggcttatgcggtggcacagaagttaaaccgtgagctgatcgtcatgtggaagcgtgaggttggctgtaacgtaaaagcagaagaactgtttgatctcccgttccgtgtgatcgagatcagcgagaacggatactccaaggagccggttgcgcatttcagagggaatcagttaaaaaagaaatggcgcgcgaaggcagaccgttttttggagtgcggggatgtggaagcgatcaaaaagcagaaaggctacgagggactgctggcagtcatcgagaaggagccggtcatctatatcaagtccttcggaccgctctgtgagctggatgcggcaagccttgcctttttaaagccgagcgcgggtattctgcaaaagggagaaccgctgttttcccagcttggcgcaaagacggtgggggtgcatgtcagacgtaccgatcacaccgaggcgatcgccaacagtccgctgtcgctgtttgcggataagatgcggcaggagatgacggaagtgccggggacggacttttttgtggcgacggacgatgaaggggtgaagcgcgaactgcgggaagcactgccggacgcaaagctcatcttccatgattccggtatcattgaccgcaattccaaagagggaatctgcgacgcttacatcgagatgctggcgctctccagatgccggaagattctcggaagctataacagcacattcagcctgcttccgtcctatatcggcgatataccgcttgaggttgtaaagaaggattaaatttatgatagagatgaaatgctgtgacatactgggcacccggattctggtgaccaatatggcggatacagtggaacgaattgaacatgatatggaagaattgcgcggaaaatatatctgcgtgggcaatgtccatacgacggtgatggcgcatgacgatgcgcattatcatgaggtacaaaagagtgcggcgttcgtccttccggacggaaagccgctttccgtgtatagcagaaaacacggtttcccggaggcggagcgcgtgacaggtccggatctgatgctggaactgttcgcaagagagaacggattaaagcattatttctacggcggatcgccggagacattgcagatgttagagcaaaagcttaaggagcgctatccgcatcttcagattgcggggatggtatccccgccgttccgcagcttaagtgagaaggaggatgcggctgaggttgagaagatcaatgcgtccggcgcagacatcatctgggtcggactcggggcgcccaagcaggaaaactggatgtacgatcacagggataaagtccacggcgtgatgattggcgtcggcgccgggtttgactatcatgccggcaacatcaagcgcgcgccgatgtggatgcagaagttgtctttagagtggctgtaccgcctgatgcaggatccgaagcgactgttcaagcggtatcttgtgacaaacacgcgctatttatggctgaccagaacgaagagacagtaacgagaagaaggaggcagcattcgtatgtgtggaatctacggtgtaattaacagaaaagtgagacgggaacaggcgatggagtgcctggatacgatgatacatcgtggaccggacggatttggactgtggcaggaggatggtgtgacgctcggtcacagaagactggcgatcttagatctctccagcgccggaagccagccgatgtcctacgccaatgagcgctactggatgacgtttaacggtgagatatacaattttatcgagatccgggaggaattgcagcataaggggtacacgttccgcggaaacagcgactcggaagtgatcatggcggcgtactgcgagtggaaggaaaaatgcgtggaccgctttaatggaatgtggacgttcgccatctgggacagacaggaaaagagcctgtttctctccagggatcgttttggcgtgaagccgctttactacaccgagttcccggacggaggattcgcctttgcatcggagatgaaggcgcttctcccgctgcttgagaaggtggaaccgaacaaggagatgttcgaccgttattttgcggacaatcattatgagtcccagccggagtgcctgatcaaggggatcaagcgattcccggctggaagttatgcgtggattcgcaatggaaaaacagagatcacacgcttctggaacacactggatcatctgatcgaggtgccggatacctacgaggagcaggtagagcagttccgcgagctgtttctggatgcctgcaagatccgcatgagaagcgatgtgactctgggaaccggactcagcggcggactggattcttccgccaccatctgcgccatgtcttacatttccagaaactgtgcggatgagcgcgcgaacaaagactggcagcacgcgtatgtggcatgcttcccgggaacggatctggatgagacaaaatacgcaaagcaggtgacggattatctcggcatcaggcatacgtttttaacgattgacgacgcggtgccggagcgggaatttctgcgtcagctgtactgctttgaggaactctggggcaatccgcaggtgcctatgatggagctttataaaaaggagagagagctcggaacgacggtatctctcgacggccatgcggcagatgaattatttgccggctacggattcgacgtgttaaaagcgtatccggatgcaaagggaaaagcggagatcgaccagattacgatggcatatttaaatcagcggagtgagatgggatatgacccgtcgtccgcagaatttaagcggcagcggaataagctgtaccgtgactatatgacgaagtattatgcgaagaagcttctgggaagagcggatgtatcgagcgcttacgcggatcatccgaactggaagaagctggacaatctgaataaggtactgtttgtctccacacatgagacgattcttccgacgcttttgcgcaattacgacagagacagtatggcgtccggcgttgagatccgcatgccgtttctggactacaggattgtggagttcgcgttttcgatcggctggaaatccaagctgcacggaggattttccaaatccatcgtccgcgatgcctgcgcagactttatgccgcacgacattgcctaccgcagaacgaagctgggattcaatgcgccgattctggactggatgcgcggaccttaccgccagttttttgaggatacggtggcggacccggcgtttgcaaactgcagcttaatcgacgatgccacaggcgtgcgtgcggatcttgcaaagttcctaaacggtgagaatgcaaccttccatcaggcggcggatatctggaaccggatacagccgtatctgtgggaacgcgcgctgatccggcaggattggagataggagtggggatgaaacactggaaatacctggatgtggcgaggggaatcggacttctcctcgtcatcatttcacatagctgcgggctgagcccgtacctgatcaattattatatcccgctgttttttgtggtgtcgggctatctgtacaagccgggcagaagctatggggaaaatgtggtgcacaaggcgaagcgcctgctggttccgtattttggctacagcgtgttgctgctggtgttctaccgggcaatcggacgtacctggcaggagacgggaagatctgcactcggagtgctgtactcacgctactgcctttttgatacgacgacacatcaggacaacgtatttttatttaccgtggcaaacggtgccatgtggtatctgaccgcattttttgtgacaagtctggtgtaccatctggtgatcgaccgctgcttaaagagccgccggtttctgatcggctgtctggtggtgcttaccgtgctcacgatgcttttggcggaactgccggtactgcttccgtggagtctggatctcgcgtttgtgggaacgatttttatgattgcaggtacactgcttcagagagcagatttctttgacagggactggaatctgtgggtgatcattggcatactggtattttatctgtcgctcagccgggcgaatccgggcatcaacatgtcggtgcgcgagtacggcgtgtatcaggcgttcagtgttccgttttttattctgatcggtattacgggctccatgctctgcatctgggtcggaaaagcattccagaactgcattgtgggtacggtgttagcctatatcgggcagaatacgattgttcttctggcgcttcatattctcgggcttgagatttttgagatggcagcggcaaagtttatcaatatcggcgaactgaccggcgccgcgttcgtcctttaccacacggtgagggtgacggcgtctgtctgcgggtgtctgctgtttggaaaaactcttgatggaatcaagcgggcactgcacggaaagcacagagggtaagtacatggaaaaaacagtaaaaaaggggcgtaactcgagtatcgaactgctgcggattgtgtgccttgttatgatattctggatgcacgccgcggacagcggtgtggcgaacgggattggcgcctggattgatattgcggttgcggtcatcggaaatatcggtgtatcctgttttatcctgatttcgggatattacggaatccgcctggatgtgaaaaaaatgatgcatctggaatgcatgcttttgttctattcctggatgggactcttgtttcagtatgtgtggggaaatgcacttggaggagaggagattttatcctacctgcttccggtcatcggaaagcgttcctggtacttcacctgctattttgcgctggcgtttttgagcccgtttttaaatgagatggtggaaaagttaagtgaagcgcatttcagacagcttctgattacgatgcttgtaattttttcgggggtgacgacatttttcttctttgacatcaattcagacggcggaaaaggaatcacccagatggtgatgctgtatctgatcggccgctacatcggcgtgtaccgcgcagacagacagtacaatacggcaaagcttgccggctggtttgcacttctggcaggggtaaatttctgcctgaacggagcgctgtacgtggtgacgggaacggtgcagaaccgttttgcaagggacaatacgctgtttaccatttttgaggcaattctggtatttttgattttccggaatcatcattttgaaaatgcatttgtgaaccggctggcgaagcatgtgccggcggtcttcctgtttgagtggacgctgcggggattcatctcgcactacatgtttgattatgttgcccgctcgggagaaaatacctatgaatttctgctgctcgggattgcgctgctgctcgttgtgatgggaagcgtgatcgactgggcgcgcgtgacgcttttccatgtgccggaagcatggtgtgtcgagcacatctatcggctgggcgatcggtgtgtgcacaagataaaaagcaaaagataagaagcaaaagatgagaagcaaataaggaggtaagttatgatcgcatattttctgggaggctgttccatttacggcattgtgctgtttgtgctggttatgctgcggccgaagtctgcgctgcatacaaaaaagcttacagactgcggacgcagggagaagatcaccatcggcgtggtgttagtgatcctgattctgctctgcacactgccgatggggctggcgccgggctggaacggggaagacccgggcgcgacgaatcagtatgagctggttgcggaggcaattctgaatggacatatcaatattgacaacggggatgtcgatccgctgcttttacagatggacaatccgtatgatccgcaggcgcgtgtggatctcggcgtggactaccgctgggatacggcgtactatcacggacattattatatgtattttggcgttgtgccggtatttctgctgttcttgccgttccgtctgattaccggaatgagccttacgacttaccatgcgacgcaggtctttgtcgcgttctttatctgcggcgtctttgcgaatttttatatgatgtcaaagcggttttttaagaagatcacgcttggcatgtatctgatgctggcatcggcgttctcgatcatgagcatctggtacagtgtggatgcgccggcactgtactgtacggcgatcaccggagcgctctgcatggagatctggagtctctttttcttcatgcgcgcggtgtgggtggaagaggacgagaaaaaatccatccggctggcatttttcggaagtctgttcggtgcgctggcattcggatgcagaccgccggtggcactcgccaacctgttcgtgattccgatgctggtggtatatctgaaaaaacataaattcacgaaaaagctgttcggcgaacttgtggttgcggcgctgccgtacgttgtcatcggaattcttctgatgtgctacaattatgcccgctttgagagtccgtttgagttcggacaggcataccagctgactgcggcagaccagagcagctacggaagcattgcgttctatttttcacagacgaagatgatcgcggttgccaatgcggtgctctacaatttcgtgaactacaatccgatctgcgaggcgttcccgtatgtgatttttaacggtattctgttgaatttcccgatcctgtggtttgcggtgatcggactgtcgccggagggcgtcttaaagcgcatgaaggaacagcagatgcgcgcgtttatcgtcatgctgtttgtgattccgcttgtgattgcggttatggatgcactctggtcgccgtttatgacggagcgctaccgcatggatcagtattggatcatgggtgtgctgtgtttcctggtgatcgggttttatcatgacaatctgtccgagacggcgggaagaaagttcagctgctttatctcgctctgggcgttcatcacgattggaaagagtattctgctgtatctggtgcagaacgatggaaatgtgacttatacatatccggaagtggtggagcagatcaagatgatcctgcgtctgggaatcggtgcgggctgatgccatgggcagcagtctgtgccgggaagcggtaacagaagaaaggtttgggagtgagaatggataaaatagcagtattgattccctgctataatgagagcaggacgatagagaaggttgtgacggactttaagcgggtgcttccggaggcaacgatttacgtctacgacaataattccaccgatggaacggacgagctggcgcgcggcgccggtgcgacggtgcgctatgaataccgtcagggaaaaggcaacgtgctgcgccggatgttccgcgacatcgatgcagagtgctatatcatcacggacggggatgacacctatcccgcagagtctgcaagggagatggcggatcaggtgctcgagcgcagggtggacatggtggtgggagaccgcctgtcctccacatactttacggagaacaagagaccgtttcacaatttcggcaactctctggtgcgaaagagcatcaataccctgtttaagaacgacatcaaggatatcatgacgggataccgggcgttcagctatgagttcgtcaagacgtttccggtgctctcgaagggctttgagattgagacggagatgagcatccacgcgatcgacaagaatatgttcgtggaaaatgtggtcattacctaccgcgaccgcccggagggaagcgtgtccaagctggatacctattcggatggatttaaggtgcttaagacgattgcgagactgtaccgcgcctataagccgatgggattcttcggaatcattgcactgatcctcgccgtgatagcgaccgcctttttcatcccggtgatgggtacttacctggcaaccggtcttgtgccggattttccgaccctgatcgtctgcggcttcacgatgctctctgcgatccagtcgctctttgtgggcgtgacgcttgagaccatggcgcagaagaacaggcaggactttgagatgcagctgcagagagtgaccgccgagaaaaagcgtctgtgcggggagaaaaatgacgcagactgatcaccactgcttttatggttagatgcgtgttagtattgagggatgatagaatagtataaaagacgaagactacacgggagagacgaaagatggaaagtaaacagaataagaattcatatatatatatatatatatatatatgtagttttgataactgagctgatagtattattttggggcgcaggaatgttgcattatgcgggatctaatttgaaagagaattattatgaaggtagtgcagttcctgtatatatagaaaaacagacaggggttcctgaaaatgcaatttccttatcctatggttcctgggagattgaacttacatatgaaacggaaaatgaaacaaactgtacatcgtatatgcagacagcgcatggcgaagactatggggacacggttgtattgcttaaagaggcaaatgagaaaaagtttgatctaatgttgtatggcaatgtgacagagttttatattgtatcaaatgagccgacgctgaatgttcacagtattacggttcgtgagaccaatcagtggaatcggatgatgtacactctgctagttctgatcgtggcatcgatagatttgtttttatggcaaaaacaacataaaaagtggaaaaacctatctaatgaaaagaaaaccgtatgtctggctgttttatttattggaatcgtggcatcgataccgctgtttacagattacctgatatctggggtagatatgaattttcatttaatgcgtatagagggacttgcagagggactgcgcaacggagatttcccagtaagaatgcaaccgctatggattaatgattatggatatccggtttcaattatgtatggcgatttgttactatatatacctgcggcatttcgcttagcaggatttacacttcagactgtatataaactctatattgttggaatcaatatactcacagcgtatacgtcatataagtgcggaaagaaagtgagtgggaattataggattggcattgtaatgagtcttttatatacattgtcagggtatcgtctgaccaatgcaatttacagagctgccgtcggtgagttgactgcaattgcgtttataccgcttgtttttttgggattgtggcaactgtttcaagaagatgataagacaaagtggtatcaaagtggcgtgttattggtaataggttatactggtatacttgagtcacatttgttgagctttgaaatggtgattttgttttctgcattgtattgtctggtaaatggcagaaatttttggagacggttaaaaatgttgtttcagacagcattatttacaataggtgtgaatctgtttttcttagtaccgatgttggattatatgcttacgcaggacatgcaggttttgaatggtagcacagtagacatgcaggattacggacttttttttccacaacttagtcagatgtttacatttgcaacaaatggatctcaattaggaatattaggaccaacttcttacggaataggaaatgaagtattgatgggtatgggcctgccgcttgccataattgtatgtttgtatctctgggagcagcttgtgtataaaaatgagagaatagagcatagtaataaggtatttggtctgatgctattgagtatgtggatgacaacgtatctgtttccgtgggaaattttggagaatattcaagggataggtacattggttgcaccatatcagttcccatggcgttttaccggtctgacgttaggacttggaattattcttgggtctgttgcattgaaaaatgtgcaaatagtcgttggagatacgacgaaaaaagtaataattgcatccataagtattctggcgataatacattttacatcttatagtgaaatgcttatagcaaatgcagttccagtgaaaattacgagttatgcaggaattgatacaagggaggctgtagtagctggggagtacctattacaaaatacatatgcaatgacaattggtgcggctgagccgcaaacggaagatggaatgactatcaataactataagaaagaagatggtatagttacacttttatatgagaatttgacgggaaaagacagttatattaaggtaccatttttctcatataaaggatatcacgcagttgattcggcaagtgggtatgaacttacaatatggcatgattggcagaatattgcaatgattcttattccggtagattggagcggggaacttaaagtgtattttgaggagccgatatattggcgagtggcggaatttatatcctttacgttggtactatggagtttgatgcactgggtaaaaataaggtggaagaaatatttgcagagataagaaagtggcggagggttaccaccgcttccggtattcggaagcggtacagccttccatttttttgaaaactttattaaaataacttgcatcatctatgccgcagagtctggcaatctcctcgatagaagaattgctgtaccgcaaaagctctttggcagtagtgatttttttggtaagaatgtattggatgattgtcgtgccatattcttttttgaattcgtgggatagatagtatttgctgataaaaaaacgttccgcaagtaggtctagggaaatatcttctacatagtgttcgtcaagatagtgaagaatacttttaagtttatcgcttaagacagagtctgtgtttcctttttcgtttgcctctatgcagatgagtgttaagatattgacgatctgctgggcggtcagaaggtcggtgtcgtcggtcggctcctcgtgaaagcggatgactgactggattgcggcggtcagctcggccaggtgcgccgtgtgaaaatgccacgtctgctgtttgagaaaatagtcgtagtaggcatcgcactgcggaccgtaaaaatgaatccacatcagttcccagggatcgtcctcactgctgatgtgggtatattcgttccggcagtccagaaaaaagcagtccccggccttggcgtgcacagtggcaaggctgccgtttccgccatcgccggcggcggaggtgccgctccgtctgcccatatcgctgccggtggcaggaactggcttggcggtgtcgcggtatgcgacctcgccgctgccggagagcacgatcagaaacaggtaggactgcagaccgctccgcttgctcatgtgcggctttaaactttttaaataccccgcttcctggatatagaaaaaatgctcgcgcgtgaaggcggagggggtgttgatgacacgtctggtattggtgacctcggaggtcttgtatttttcaaaaaaagagtctctcatccgtattctcccggtttttaagtatagcaatataatactatttttgcgcaagatattcaattatcaaatcagaaaaattagattatactaaacagcggctttgaaacaggatataagcaaaataattatagaatcaaaaaggagatttcaaatgagcaaaaaagcattgattacaggcgtaaccggacaggacggaagctatctggcagagcttcttctggagaagggctatgaggtacacggcatggtgcgccgttcctccacagagaagagagagcgtatcgaccatttagagggcaacccgaacttccacgtacactatggtgatctgtccgattccatgagtatcatgcgtttagtcggcatgatcaagccggacgagatctacaacctggcagcacagagccatgtaggtgtcagctttgatgtgccggaatatacggcagatgttgtcgcaaccggtgtgctccgcattttagaggcggtacgtctctgcggactggagaagacctgccgtatctatcaggcatccacttccgagttatacggaaaggtagaggaagtaccgcagcgtgagaccacgccattccatccgtacagtccgtacgctgtagcaaagcagtatggctactggatcgtaaaggagtaccgtgaggcatacaacatgttctgctgcagcggtatcttattcaaccatgagtccgagcgccgcggagagactttcgttaccagaaagatcacacttgcagcggcaagaatcgcacagggcaagcaggacaagctgtatctgggcaatctgtcctccctgcgtgactggggatatgcaaaggattatgtagagtgcatgtggctgatcttacagcatgacaagccggaggatttcgtgatcgcaaccggtgtacagcactccgtcagagagttctgcgagtatgcgttccgcgaggcgggcatcgagctggaattcaagggagagggcatggacgaggtcggtatcgataaggcaaccggcaaggtagtcattgaggtatccaaggaattctatcgtccgaccgacgttgtcaacctctggggagatccgacaaaggcgaagtcagagcttggctggaacccgacaaagacaaccttcgaggagctggtgaagatcatggtaaaacatgacatggagctcgtcgcaaaagagaactaaataacagtccgttcagatgttatgcctggcgtgtcgcagcagtagtctctgccgcggcacgccaggttgtggtaaaaaaggagagaaagatcatgatggaaaaagatgcgaaaatttacgtggcaggacacagaggaatggttggatctgcgatcgtgcgtcagctggaaaaagaaggatatcacaacattatcacaagaacacataaagagttaaatctctgccgtcaggaggatgtggaaaaattcttcgctgaggagaagccggagtatgtattcctcgcagcggcaaaagtcggcggtatcatggcgaacagcgaagcgctggcagattttatgtatgacaatatgacactggagatgaatgtgattcatgaggcatggaagaacggctgcaagaagctgatgttccttggttcctcctgcatctatccacgtatggctccgcagccgatgaaggagaactgccttctgaccggagagctggagaagacgaacgaggcatatgcgctcgctaagatcagcggtctgaaatattgtgaatttttgaacaagcagtatggcacggattacatttctgtcatgccgaccaacctctacggaccgaacgataactaccatccggagcacagccatgttcttccggcgctgatccgccgtttccacgaggcgaaggtgtccggtgcaaaggaagtgacctgctggggtaccggcacaccgctccgcgagttcttatatgtggatgatctggcggatgcgtgcgtctttttaatgaacaattacagcggagatgagaccgtgaacctgggaaccggaaaagagctcacgatcaaggaactcacggatctggtcgcaaaggtgatcggctataccggagagatcaagtgggatccgagcaagccggacggaacaccgagaaagcttctcgatgtcagcaagttggagagtctcggctggaaatacaagacggagcttgaggacggcattcgtcttgcatatgaagatttcttaaacaacccgatgagagcggaacgatagaatcaatttcgattaggaggaactgtagatgtatattgtgttattatccggtggctcgggaaaacgcctgtggccattatccaacgatttatgctccaagcagtatatcaaactgatgaatcacgacgaggaacaggagaacagggaaaaatgctccatgctgcagcgtgtgttcggtcagcttaagaacgtgggactttccgagaacacgattgtgtgcgcaagcagcgcgcaggtggaactgatcgagagccagctcgacggtgcggcggaagtggcagtggagccgatgcgccgcgatacattcccggcagtcatgctttcctgtgcatacctgctttccaagaaaggtgccaaggaagatgatgtcgtggcattccttccggtagatccgtatacgaccggggaattcttccgccgcatcaagcttctgggagataagattgcagcttccgaggatacgatcggtctgctcggcggtgtgccgacttacccgtctaccaagtatggctatatcgtgccggagcagggcgagggagaactgttaaaagtaaccggattccgcgagaagccggacgaggcgacggcagaaaagctggtttccgacggtgcactgtggaactgcggcgtcttctgcttcaagctttccatggcagccggctggctggcaaaatacggcgtcggcgtcgattacgataagatggttgccgattatgagaagcttccgaagaagagctttgactatgaagtgttagagcactgggagcgcatcgtggcgatcaaatatgcggatctgtggaaggatctgggtacatggaacacactgaccgaggagatgccggagaacagcatcggtgatgtgacatgggatgatacctgtgagaacagccatgcgatcaatgtactgggaattccgatggttgtgatgggcgcgaaaaatatggtcatcgcggcatcccatgacggtattctggtggcagacaagcaccagagctcctatattaaggattgtctctcccatatctcggatacatcgaagtatgaggaacgccgttggggaacgatcaagacgatcgacaacgacgaggataacggcatcaagagcgtgacaaagcgcatcaaggttgttgccggcaagagaacgccggagagcagacacatgaatcacacccagacgatcaccgttctctctggaatgggcaagctgatcttagagggcgtggaagtggatctgatggcaggggcaaccgtgagcattgccgcaggaaagacctattccattcaggcactcggatctgatctgcgctgtatcgagatctccatcagcaagagcaaggagaacgcataatatctaatattttataaagaatgtgcttgttttgcttgcctttttggtaaaattgtgataaaaatggaaaagatacggaagtatcagaaaaaaagattgaatttgatacgaatatggtttatactataaccgtagaaaggggaatgattttatggatacgaacgatatttcagcatgcgaaaagctcgtgatgaaggtcatttgggattctacagaagaattggcattgcaggaagtcatggatggagtcaatcatgagaacggcaagaactggaagccgcagactgtttccacatttttatcccgtctggtaaagaaaggctttctgaatatgtaccgcaagggcagatactgctattatcagccgcttgtcagcaaggaagacttctggcgcgcgacgatggaagagagtgcaaagttctttacgaagggagatctcggagaactggcatgctgtctgtgtgatgacatgctggatgcgaaggacatcgagaaactaaagaaaaagctgaatgaacatagctaatcagattttatttgcagtggtaattacctctgtcacgggaacggcagcgtacggactctggcggctgcttatgaacagccgcttttgtacgaagccgcaatatgtatatctggcgctttttctggtctgcctgttgtacctgattccattggattatggatggatgcagatgacgattcacggttatctgcagaaggaaggtatctggcagatcaatttttctttaacgggatttttatggattcttgcgttctttgccgcagtctgctggcttgccctcatggcaaagggaatcacagagtttgcaggcagcctgcgcgggatgaagcggattcagatgcgcgacattccggaggaagaggaagccgtgcgggaagagttcgcgcgtgtgaagaaaaagcttggcatccggtcgaacatccgtctgtaccggaatgaccgtatcaccagtccgatgcttgccggtattttccggtgccgggtggtgcttccggatattgcctacgacagaaagcatctgagcgtgatctttcatcacgagctgatgcattacaagagtcatgacccgtttgtcagattatgcggtatgtgtgtgactgcagtgcaccacatcaacccgctgacggggaacctgatggcactgctggacgagtggagcgagatttactgcgatgcacgtgcgattgcagccatcagcgatgaaatggatgcagggtgttattttgaaatgattatagagagtgtgaagcacagtcctgtgaccgatgagaattatattttttctatgctttatgagaaccagagaagactggaaaggagaattgagtatatgggaaaatataacggaaaagcagcatcgagactggcaagtgtgtgttttgcggcggcttttgtgctggtgagtgtgacaccggtctatgcagcgggcagcgaggctgcggatgtacacgatgatatctatcagaatgtggaggctctgacggcagatggcagcgaggagaacgtgctcgaggaacagcagatcttaggcgtgatggatcgctcttacgatacgctcgagtatgcgtatccggagcttgaggtgatcagcccactgctgagtgcgaatgagatggcaacatttaactggaatgtgtctccgggcacgcgcatggtgagcaaccagttctgggtgaccaagggtcagacaattcatattggctctacggcgatcccggatagtagcacgtactggatcggcattatggacggtctgaataacgcacgttatgtggagggaaccggcaatttatcgcatggtttttcgattacgagcagcggacattaccgcgtctttgtgcagaacaagagcagcgtgcagatcaatgcagcgggaagctattattttaattagcatcagtttgcagtgagaagtgcatcggaagatgcaggaaacgtaataaaaaagaagaggcatttcgcctctttcttttcaaatgaacaaactacatagataagtataattccacagttacagggtatttcacacaagtggaagtttcacagggaactttcaataggaactcgccagagttcatgacgatatcatttcagggtaacagtattcggggcggtgctaaaatcaagcaccgtctttccttttgcgagcagatcagatttgagtgtgctcgccggaaagtcggcgttgtcggtaatggaggaaggcgcatcgataaaatagacggaggcgccggctgcgtcgtagaattcctccgagaaagaccagtttccgtggtgaccggtctgcacgtaatcgcaggcgagctggtctttgcatgcgacaagcagggaatcattcatatcgtatttgatgtccgaacaaaagagcatgctgctgtttacgctgcttacttttaagaggagggaagcattgttctggtaatctttctcatctccgacattctgcagaaccgtgtcgtcataggcatttaggacggagaacgtcagaccgcagatggagaggacgtcgccgcggtgcaggtgcgtcacgttggaggcatcccgggtgagcgtgtggtaggtctccatcaccgtaatgtcatcgtacggctctccggccgcttcgataaagtcatagtcgaaaccgttgtcgtagacggcgtcgatcgtgatgccgtccggtgaggcgtagatctgattgaatgcgccggcgtgatcctgatgcggatgtgagagaatccaggcgttgacatggttcccgtgggcggcgatgacctcgcgtacggcggaggcgttgtctgcccagcccccgtcgatgatgatgagggtggtatcgttcgtgatggtgtaaaaagttccctgcacgccggttgcgtccgcgtattgcgtcaccagatattccgtggcgggatcgggggtgtagccggtggaatcttttttggattccacgggtgtatgatgggagcatgccgcgagaactacggcaaaaagaacgacaatgacagtggaaaaaaggtgtttaaaacgcatcataaggactcctttgagttgatcggtttattctttgcattctacattaacagagaacaaaaggaatgtaaaggcgtggtaacaacttgacgcaaaacgtcggaattgttatagtggaatacgaaatcaaagagattgaccgaggagtcaatggcgagagaggacggaccatggatacacataaattttttgtggaaaagatgcggttccatctgaaggaacaggacacgctggtctttgtcgggtggttttttgatgggagtacgaaggaacattccatcaaggcatatctggacaacagagagcttccgcttacggtacaggtgaatcgcggtgcggaggtccggcagaaatatatccgcagcatcaatgagatcgaggaggaagtggtaggcatcataaagcttccgccggactggcgcaatggccgccgggtgacattgatggctgcttacagggaagaatataagaaatcttatgccatctcaacagcaaagcttggcagactggagaatgaagtcagctactatgtggaaaactgtcacagagaggggagccagattacggtcactggctggtgcatgtcggcgggggatatcaagcttgaacttctcgacggcagcagacagccgatttccgagaaggtggagcactattaccgcaaggatcttctttctgtttttccggaatgtgataaggaggcgaagcccggttttctggtgcagggaaccgcagcgggagggcagagcggaccgttttatctggagatgcgtggcgcgaagaatcattcgagaaccagactcacgaagtgggacgagggcacgaagctgcagtatgtaatcgaaaaagccggggataccgtccgctatctggagcgcaacggaatctctgcaaccgcttataagattaagagcaagctgacgcacaaagagggcaatacctatgagaactggcgggcaaaatatcttccggtgccggaagaactgcagcgccagagagaggatgtgtttgatgcggaaccgttgttttcgctggtcgtgccgctctataagacgaagccgcagtatctgcgggagatgattgattccgtgacggcgcagacttacggaaactgggaactgtgtatggcgcttgccgcatccggggaagaggatgcagcactgatctccattctggaggagtatgccgggcgtgatgcgcggattcactatcaggtgctgccggagaacggaggaatcgcggaaaatacgaacgccgcgcttgtaatggcttccggagactatcttgtaccggtggatcatgacgatctcgtgccggaaaatgcgctatacgaatttgcgtcggcgatccgcagggatgacgtgattgatatgctctattccgacgaggacaaggtcagcatggacggcagacacttttttgagccgcatttcaaaccggactttgacctggatctgttgtgcagtgtgaattacatctgccacctgctcgcagtgcgaaaagatgtggcggagcgtgcggggagctaccagagcgcgtttgacggcgcgcaggatctggactttatcctaagatgcagcgagcaggccaaaaagatttatcatgtgccgaagattctgtatcactggcgctgccatatggactcgaccgcatccaatccggagagtaagctctatgcgtttgaggcgggacggcgcgccattgaggagcattaccgcagactgggaataccggcgcgcgtggaaaatgcatcgttctacggaatgtaccgcacggtctacgagtggaaagaggaacctctggtatccattatcataccaaacaaggatcacgcggaggatttaaagctgtgtctggattccatttttacaaaatccgactaccggaattttgaggttgtgattgtggaaaataacagtaccgagccggagacgtttgcttattataaggaacttgaggcggggcatgaaaatgtccgggtggtgtactacgagggcggctttaactactcaaagatcaataatttcggcgcggcggcatgcaggggagattatttcctgctgctgaacaacgatacggagatgattgacgggggctgtatccgggagatgctcggatattgtatgagagaggacgtcggaatcgtcggtgcaaagctcttgtatgcggacgatacgatccagcatgccggtgtgatcttaggctttggcggcacggcgggacatgctttcattggaaaatccagatacgatacgggatattttggcagaattctgtgcgcgcaggattattcggcggttaccgcggcgtgcatgatgacgaagcgccaggcgtttgaggcggtcgggggaatgaccggggagctcgctgtggcgttcaatgatgtggactactgcctgaaagtaagaaagcacggatggctcgtcgtgtacgatccctacgcggaaatgcaccactacgaatcgaagtcgagaggctatgaggattccccggaaaaagtcgagcgctttaacggcgaggtggagattctgctttcgcgttggagagatcagattgagcagggagatccctactacaatccgaatctgacactggacaattctgatttttcgctgcgcagataacgcgggggacggcgaaaacaggtgaataaaacaaaaagacagctggtacgagacagaaaagaggagattccggttctatgatgaaggtatatatatgtccgtcctgcggctggatgcgcgtagtgtccagacgcaaggatgtggaatgctacaagtgcagtgagccgcagatggttcttgcaaaaatggatttcggtaagtacacggaaatgtcagaagaggaaaggaaagattattccgatggatggctttacatccatcagaagaagcattgagcatatgaagattacagtgcagaaggttatcaaaggggtgcgttatctgaagcattacggagtgaaggagttcttcatccggctgcaggagaagatggaatcggaaaatgtgccgtatgagccatggtatgagcatcacaaggcgacggaggagacgctgcgccgtcagcggaagcagtctgccgcgtggaagggagcaccctgcgtcagcatcgtagtgccgctctattgtaccaatgagacattcctgcgggagatgatcggttcggtgcaggcgcagagttacgaaaactgggaactctgcctggcagacggaagtccggaggaaaacgctgcgcgtcttgaggcggtcgtgaggaaatgtgccggagaggatgcgcgcatctgttaccgcagactggaaaaaaatcttggaatcgccggcaataccaatgcggcgattgcaatggcgcacggggagtggattgcacttttagatcatgacgatctgctggcgccggacgcactgtatgagaccgtgcatctgattctgcggggaccgaaggatgagaccggagttgcagcgacaggttttagaaaagccggtgcgcagtatgacatgatctacacggatgaagacaaggtggacatggatggaaaaacgcatttccagccgcactttaagccggacatcaacatcgatctgcttcgttccaacaactatatcacgcactttaccatgatgcggaaaacgcttctggagaaagccggcatgatccgtgaggagtatgacggtgcgcaggattacgacctgtttctgcgctgcgtggaatgcgcagaggccatcggacatgtgccgcgagtgctctaccactggcgctgccacacggagtcgacgtcggaaaacccgttttccaagcagtatgcggtggatgcgggacggcgcgcgctcgaggatcatctgaagcgtcaggggattgcgggggaagtgacggcgacaaaggatatgggcttttacacggtgcgctatccttacagcggcaatccgctggtctcgatcgtgataccgagcagggatgaagtggagacgttaaaaaaatgtcttgcagccattcaaaaaacgcattatgcaaattatgaagtcattgtggtggagaataacagcgctccggagacatttgacttttaccgctcgatcacatccgaagaggtgaaagagggcgaagcggtgtgctatgagggaaccttatccggcggacagcggatctgcgtggcagtctggaaggaagggtttaattattcggcgcttaacaatttcggcgtctcttttgcaaagggcgaatatctggtgcttatgaacaatgacatcgagatgattaccgaagactggctcgaagagatgcttggcacctgccagcgcagggaggtcggtgtcgtgggagcgaagctgtattatccggatgataccgtgcagcatgcgggaatcgttgtcggaatcggcggcaatgcgcgcggcatcgggcagaatatgtttatgggactgcagagagcgcgcagcggatacctgcacaaggcgtcgcttgcgatggattactcggcggtcacggcggcatgcctgatggtaaagcggagtatctacgaggcggtgggcggatttgaggaaaagcttgccgtggcgttcaatgatgtggacttctgtctgaaagtccgcaaagaggggtaccttgtggtgtaccagccgcgggtggaagcctatcactacgaatccaaatcgcgcggaagcgaggattccccggaaaaagtggcgcgcttcggacgagagatcgaatatatgcggaatcactggatcggcattttaaagaacggtgatccctactacaatccaaacttttcaacggtatatccgaattatgcgctgagagattatcattaagcggaggtattacatggcgagtcagccggaagttacggtgattattccgaattacaacggaaagaagcttttggaaaattgtatacagaccttagagagacagacttgcacggattttaagcttctggtggtggacaacggatcggacgacggcagtacagaggtgacctccagcctggatcttacgatgcttgcgctaaaggagaatacgggcttctgcggagcggtgaatgagggcatccggcgcgcggatacgccgtatgtgatcctgctcaacaacgacacggaggttctgccggaattcgtggaggagctgctggctgcgatcaaaaaatcggaccgcatcttttctgcgggggcaatgatgattgattatcacgacagagggcgcatcgataatgccggcgactattacacggcattcggatgggcgatggcgcgcggaaaaggaaaaccgctggcggattttaacagaccgtgccgtgtgttttcctgttgcggcggcgctgtcatataccgcaccgggctgctgcgtgaaatggggccgtttgacgagcgccattttgcatatctcgaggatgtcgatatggggtatcgggcaaaaatccacggatacatcaactgctatgcgcccggagcgcgggtgtatcatgtggggagcgctactacaggaacacgttataatgagaaaaaggtgttcctcgcggcgcgcaattcgatgtatctgatctacaagaacatgccatttttacagctgctgatcaacctgccgctgatcctttcaggtattctcatcaagagtctgtttttcctgaaaaaggggtttgcgggagaatatttaaggggaatcggtgccgggattaccgggtgccgcggatgcaaaaaagtgcggttctcatggaaaaatctggggaattacgcgctcatacagctggctttgtggggcaatgtgatccggattctggcaggaagataaatttgatcgtcaaacaaatctttaaaaaatattaagaaaatgttacagaatgtttgcgaaaaaggcgttgtgcttttatggaaattattgtatcattgatgttatatggtagttagaattcgcaaaaggatagcaatatgataaaagacaatcagcagtactttaataagctgcatgtactgatcgatgccttggttatcatcgtatcgtatgtgtttgcatggtggctgaagttcctgagcggtattctggatcatgaagtcggcgtactctcatttgagttctatatgagggcgctgctgctcattgttccggtgtatattttgttgtattatgcgttcaatctgtacacgtccaagcgcgtgcaggggagacggctggagttttccaacattgtgatggcgaatacggttggactgctgctgatgtttgcggctctctttaccctgacgtcctacaatccgcagtatcgcaacttctcacgggagatgcttttttatttctacgtgaccaatattgtggtggaagagattgtccgccttttgatccgcagatttctgcgaagtattcgcagaaggggatacaatttaaagcacattctgctcgtcggctattcaagagcggcagagcagtatatcgacagaattcagcagaatccgcagtggggatacaatgtgcgaggggtattggatgacaatattgccagaggcacttcctataagggagtgaaggtcatcggcagtattggtaatctcaactacatcctgccgcagaacagtctcgatgagattgcaatcaccctcggactggaagaatattataagctggaaaaaatagttgcggagtgtgagaagtccggcgtgcacaccaagttcattccggattacggcaacatcatacctacgagaccttacacggaggatcttctgggtctccctgtgatcaatatccgctatgtgccgctgtccaacacgttcaacgcatttgtgaagcgctgtatggatgtggtgggatcgattgtgtgtatcatcctcttttcaccggtgatgctgctgtcggcaatccttgtcaaggcgacatcgaagggaccgctgatctttgcacaggagagagtggggctgcacaataagccgtttcagatgtacaagttccgcaccatgtatgtgcagacggaggaggaagaacagaaaggctggacgaagaagaacgatccgcgcgtcacaggagtcggaaagttcttgcgcaagacaagcctggacgaattcccacagttatttaatgtgctgaagggcgatatgagtctggtgggaccaagacccgagcgtccgcagtatgtagagaaattccgggaagagatcccgagatatatgatcaagcatcaggtgcgtccgggaatgaccggctgggctcaggtcaacggataccgtggagacacgtcgatccgcaagcgcattgagcatgatctgtactacatcgagaactggacactgggactggatgtcaagattctgttcctcacggttttcaagggatttatcaataaaaatgcatattaggagaaaaatttatgagtagtagtggcaacagcagaaatggggcacatagcagcaacggggcgcacagcagcaaccggatacagacaggcggcagcggacatccgcagaagaagccgctgacaaaagcacagaaggcagcgatccgcaagaagaagcgtcagaagaagattattctcgttgtggttgagatcctggtacttctgcttctggcagttgtattgtttgcggtagtgaagctctccaaaatcgagaaggacacctctttcgatgagagcgatctggaattcaacgagggactttcttcggaatcccagcagatcatgaaggggtatacgacgattgcgctgttcggattggacaaccgttccaacggcaacttatccaagggtaacagcgacgtgattatgattgcgagcatcaacaacgatacacatgaggtgaagctggtatccgtatacagagattcctatctcgatatcggcaacagcacctaccggaaatgtaatgcagcctatgcgaacggcggaccggagcaggcgatctccatgttaaacacgaaccttgacttaaatattacggattatgtgaccgtggactttaatgcggtggtagagtgtgtggatcttctcggcggtgttgagatgaccgtaaccgatgaggaagcggtgctgatgcacggctacatggatgagatctccaagctgaccaagaagaaatccgagtatctgccgggagccggcacctacacaatggatggtgtacaggcatgtgcattcgcgcgtatccgttatacggcgggcgatgactataagcgtaccgagcgtcagagagcagtgcttacggcaatgatccagaaggcgcagaagtccgatctcaagacgatcaacagcctgatcgatgaggtattcggcgatattaagacaagctacagcaacaccgacctgattgcacttgcatcccaggtattcaattacagccttggcgagacgaccggattcccgtttgagaagaatacgatcacgctcggttccaagggaagtgtggtagtaccgtgtgatctgaaatccaacgtcattcagctgcatcagttcctgtacgatgatacggaatatgagccgacagacacggtaaagagcaacagtgaaaagattatcagtgataccggattccaccagggagatggctattgatgcgtgtagatatcataattccgacttacaaaccggatgacactttttgtctgctcctgcaaaaattgcaggagcagacctttgttatacatgaacttattttggttaataccgaggaagcactgtggaatgaggctgtacggaagtatccgatcgaacagattcggaaggagcttccgttttctagccgcatttttcacatgaccagagagaactttgaccacggcggtgccaggaatatgggagcggggtattccgaagcggatattctgatattcatgacacaggatgcggtgccggcagacgaaaggctggtggaacatctggtgcatgcgctcacatccggtgcgcacggtccggggactcctgccaaaggtgcggttgcggtcgcgtatgcaaggcagctcccgcgggaggactgcggcatcattgagcgctataccagacagtttaattatcccgatgagggatgcgtcaagagccgtgaggacataccgcggcttggcattaagacttttttctgctcggacgtgtgcgctgcataccgcagggatctgtttgagcagctcggcggatttgaatcgccggttatttttaacgaggatatgttttttgcggcgcatgcagtgcaggaaggatacaaggttgcgtatgcggcggacgccgaggtggttcattcgcacaactattcggtgaagcagcagtttcaacgcaattttgatctggcggtgtcccagacggcacatccggagatctttgagcaggtcagctcggaggcggagggcatgcgtctggtgaaaaatacgatgggttatctgtgtaagattcacaagccgtatctgatctggaagttagggtggcagtgtgtcggcaggtacgccggctattttctgggaaaacgctatcagaagcttggcagaaggcagatcttgaagtgtaccatgagtccgtattactggaagcggatatggtcagaaaagtagggagcagaaaatgagtaacatactatatatcgtagtaccctgctataatgagcaggaagtacttccggagacatccaaaagactgcgggaaaaagtgcagacattgcgtcagagcggcaaaatcgacgcggacagccggattctgtttgtgaatgacggatcgaaagacgcgacgtgggagatgattcagaagcttcacgaggagaattccgtattttccggtgtcaatttatccaggaaccgcggacatcagaatgcgcttctggcagggattgcggtggcggtggaacatgcggatatgatcgtctccatggatgcggatctgcaggacgatgtggatgcgatggaccgcatgatcgatgcctatgaagcgggaaatgatattgtctatggcgtgcggtcttccagacagaaggacacgttttttaagcgcaacacggcacagcttttttaccggatgcttcatttcctgggggcggagatcgtgtacaatcacgcggattaccggctgttaagcagacgtgccgcaaaaggactcctgtcttttgaagaggtgaatctgtttctgcgtggaattgttccaatggtgggctatcagagtacgaccgtaacctatgagcgcggggagcgtttcgcgggggagagcaaatatccgcttggaaaaatggtggcatttgcgatggagggagtgacatcgctctcggtcaagccgatccgcatgattacgatgggcggattgtttgtgtgcctcgtcagcctgggaatgctgattaaggcgtttgtggattacgcgaacggcaatgtggaaccggggtggacaagtgtgattatttccatctgggtgctcggcggtctgcagctgtttgcgattggaattatcggagagtatatcgggaagacgtatatggagacgaaacggcgtccgagatatctgattgaatcggtgcttttggatgcagtagagcaggaagacactcccggcagggaataacggttttgatttcggaataaccggttgtgatttcttttgggcatggaatctgtggaatagagggttttatgagtaaaaaatataaagtgtggattttttgggcattgatgctgatcggggcacttctggtggtaagtcagagcagctattcggatggcgacgatgcctttttttatcagtatacaaacagtatgggatttggagagtatctgtcctggcgctatcagacctgggtgggaagaatgtcgggagaggcgtttgtgtatcttgcattccggctagggctcggcttctggcgtgtggtaaatgccgtgatgctggtgcttctgccgatgggggtgctgcgcttgtcagaaaaggcggcagggattggtgtacacagtgaggaagcgatcggaccctgcgcagcggcagtgggcggctattttctcatgaacattatgactgtcggctatgcggcggtctgggtgaatggttccatcttctatacctggtgttttacctgcggaatctgggcgctgatgccttttgcggacgcagtgttcgcaaagccggaggaagagcctgcgctgaataagaaatattttctgatcagcataccgtgcgcggtggcaggaacgatgtccatcgagcagatgagcgctgttttgctgacgtttgaggtgttggcggttgtcgcactgttccttcgccataaaaaagtgcatccgcttcttctggttcagacacttacgacagcggtggcgtttgtgattctgttctcggctcccggcaatgagatccgtgtggcaagtgagattgcaaactggatgccggaatacgagacgatgcctttcggacagcatgtgttcatcacgatacactggctgctgtcatcgtttgcaaatgagaacaaactgtttttatgcggcatctgggttgtgggaatccttcttctgctgcagcaggagcagaagaaaaagagagactggatcgctcttgggatcgcggcggtctttaccctggccgcattgcttccttatgcaggctttgatctgttatcggatatggggatgcagtatatcaatatcgaagcgtgcgtgtaccaggtgccgtccatggcggtgatgacgcgggaagtgatccttgcgatgatctggtgggctgcggcgctgcttttcaccctgccgtttttatggcgcgtgtcaaaaaagcacatcacgctgatgctcgcctatcttgcgggaatcgcgagtgaggcgattatgtattgctctccgacgatgtatgcgtccggtgcgcgtgtttattatctgacggatcttttatatctgtttattattttgacacttgcattttccctgaaaaagaagcgctggagaaatggattctatgtgggactgctcgtggcgggcgtttggaatctggtgtggcaggtccttttttagacagaaaagaacagaaacatacttttttgatactttcgtcacaattacatcacattttccctgtaaactgcatcatagaaagtgagagagaaaaagaaatactcactggaacagaacaaagagttgtcagggaaaggagcaattattatggataacaatgaacgtaatcataaccagtcttccgattccttctattcatataataacggaacgaatcagaacggcacatcgcagaacaacggagcatacagcgcaaacggagcttaccagaatggcagcgcatacggtcagaacggaggaacctaccagaacggaggaacttaccagaacggaggaacctaccagagcggcacacagaataacagtgcatacggccagaacggaggaacctaccagaacggcggttatcagcaacagttctaccagagccagggagctgggaatgcggcgtacggtcagaatccttccggcaagaaggaaaagaagagaagagaaaagagagagagaaagccgggcggctttggtatgaagcttgcaaaatgtgcggcactggcacttgtcttcgggctggtatccggaacggtgttcgagggcgtacatctcgcatcgggtcagattttcggagactcggattccacggtggcagccacaggcagcgtgctgacacagtccgattccaacaccaagattgaggcgaccggcgcatcatccagctatgtggcatccgatgtctctgacatcgtggaagcggtaatgccttctatcgtatcgatcacgaatgtgagcgaatcccagtatcagagctttttcggcggaacacagacacagcagagcacaagctgcggttccggtattatcgtgagccaggatgcagacaatctttacattgcgaccaacaatcatgtggtggagggtgcagacagcctcacagtcgcattcagtgacaacacaaccgtcagcgcggagatcaagggtaccgatccttccacagatcttgcagttatccgcgttgcgttaagcagcatcgattctgacacattaaatacaatcaaagttgcaacacttggcaattcggatgatctgaaagccggacaggcagcgatcgccatcggtaatgcactcggctatggtcagtctgtgacaaccggtgtcatcagcgcattgaaccgtgaagtaaccgtatccgattccaacagcaacacaaattacaccgcagaactgatccagaccagtgcagcgatcaaccctggtaacagtggcggtgcactgctcaatgcagcaggcgaggtcatcggtatcaactctgtaaaatatgcagacacaagtgttgagggaatcggttatgcgatcccgatcagcacagcaatgccgatcattgaggacctgattacgaaggaaaaggtagatgaggcagacagtgcatatcttggtatcggcggcgtcgatgtcacaagcgatgtggcaaaaacctacaatatgccgaccggtgtctatgtaacacaggtaaaagagaactccgccgcagagcaggctggaattcagaagggcgatattattaccgcatttgacggcaaggatgtctcctcgatggaggatctgtcctctaaacttcagtattacaaagcaggaacgaccgtggatgtcaccatccagagatcttccaacggacagtatgaagagcagacgctctctgtcacactgggaaagaagaactgacagagaaagggctgacacagaggttgggatttgattataaggaacctgtaggtgtgaagttccgaaatgtaacaggcgacggtaaatctttgaagcaaaattcgagtatttcttccatgccgcgctatgcatcagattctgtgtctcttgccacgctttgacaatccgcaggatgtgtccgacaaaccgcagacaatgagcggattccctagtgtccctagcggcatcgcttcacagacaatataaaaccgcgcgaaccgaaactcattgccatctgctattgaaaatatggcagatggcaattcaaacatcggcttcgcgcggttatgttttgttcgacataaagatggcatttatgccatctgttgtctggtgccgcaagggacacacgagaatcctaaaattgtctgcaggttgcggacacatcctacggagtgttcaaagcttggaaagacacagatcatcgcagatgcgaagcgcggcgtggttagaaataccggattttgcggtcagatttaccgccgcctgttatatttggaacttacatatgaatttccaggttatcagatccctgcctctgcgtcagtccctttggtctgtcagtcttctgtctcagtgttccatcttccagaaggctgcggagtaaggcgggagcgtactgccacctccaaagtcgtgcgtcttcccggtgagcaggtcaacagctgtgccgcagcctgcgtcgaaatgcgccgtgaagctttcggaatcggcgttgatggcgactaacacacgctcgttggcgcttttccgctcaaagatggactgcttattcgtgagcaggacagagcggaaatcgccgtagtttaacgcctcggaagactttttcgcggcggcaaggcggctgatgaaatccgtgagcgtggtccattccggtgcgtcaaagcaggcgcgcaatgcgggatcgccgtcctcttttcgcgctttggcaccccattcacttccgtagtacacgcatggaatgcccggcatgccgaactgcatggcatagattaacggaaggtgcgcctcgtttgagaggatgcttgccacacgggtgacgtcatggttgtcgacgaaggagagcaggtgctttcccttgtacagagtccagttgtccgggccgaactggcgcagcagagagtgattgatctcgaacatgttcatggagttaaaactggaatacagtcccttgtagcactcatagtttgtcacggagtgcagcatggcgtcgttcatgatctggttgtaatcgccgtgtacgacctcgccgaccaggaagaaatccggctttaaggtgtcacagtaggcgcgcagccttcggataaaatcatggtcgaggcagtaagccacatccagccgcagtccgtcgatgtcaaactcatctatccagcccttgatgcaggaaaagaggtgtgcgatgacatcctcgttgtgcagattcagctttacgagatcataattcccttcccagccctcataccacagcccgtcgttataattggaattcccgtcaaaactgatatgaaaccagtccttgtagggagagtcccatctcttctctaaaacgtcctggaatgcccagaaaccgcggccgacgtgattgaagacgccgtctaagacgactttgatgccggcggcgtggaggttgtcacacacttccttaaaatccgcgttggtgccaagtcttgtgtcgatctttgtgtaatctctggtattgtagccgtgggtgtccgattcaaagagcggtgaaaaatatacggcgtttgcgccaagcttttgaatatgaggaatccagtcgcttaccttttggatgcggtgggtgagaaccccgtcattttcaaaaggtgcgccgcagaacccaagcggatagatctgataaaatacactttcatatgcccacataatgcgttgcctcctgtgattgcttttttatttcgctgtgctcatgtcgtgtgattttttagagcaggcgcgctgtgcagtgattacggtgtcacgcagaccgccccgttccaatgcggcgacagcctcgatcgtcgttccgcccggagagcacacggcgtctttcagttcgccggggtgtctgccggtctccaataccattttggctgcgccgtagacggactgggcggcaaatttgtaagcctgtgcccgcggcatgccgtcagcaacggcagcgtctgccattgcctcgataaacagatagacataggcaggggaggaaccggacacgcccacaacggcgtcaatgaggctctccggtacgacttctgcttttccaaaggagttgaagatcgcctgcacttcggaaagctcggcttcggtgacatgtgcattgacacacagggcgctcatcgcttcgccgacgagggcaggtgtgtttggcatggcgcgaacgagcttgatctctttgccaaacgctttttcgatggcagcaatggtcttgcctgcagcgatggagacgatgatgcagctgctcttcacatgcggggcgatctgcggaatcacctcatcgaacttgttcggcttgacggcgagaaacagaatatcgctgcgttcggcgacggtctcattggagagtgtcgtctcgatggagaaccggctgtgaatggtgtcaagcgtctccttggagtgtgcactggcgatcacctgccctgtggttaccagggaggcgtttaagatgccgccgatcatggcgctgcccatgttgccggcaccgatgaaaccaatgattttgtcaaacatatcaaaaaccacctttctatgtattgtatgctgataccagaacagccggctaaagatagccggctgtctttctataaaatatggtagcgtttttagaaccaaacgtcaagtcctggtgtacgatgtttagaaatctgtcagattggcagctctcttctcaaggaatgcgcccattccctctttcttgtcatgtgtgtcgttgacaacaccaaagaggtttgcttccatctcaacggcattcttgatgtccatgtcgtagccgttgttgattgctgccttggcaacggagactgcgtagcttcccttggagatgatctttgcagccatagcctttgcggtagccatcagttcttcttttgcgacaaccttatttacaaggccgatgcggtatgcttcgttggcatcgatattgtcacaggtaaagatcatttctttggcacgtcccataccaacaagacgggcaagtctctgggtaccgccgaatccagggataataccaagaccgcactccggctgtccgaaaacagcattgtcggatgcgatacggatatcacacgccatagcaatctcacatccgccgccgagagcaaaaccgttgacagcagcgatggtaacctgacgcatattcattaacttgaaaaatggaacagaagccttgatgccgaatgctcttgcttccggagcggtgaagttcaccatctcggagatatcagcgcctgcaacgaaagacttgaactcgttgcccttcttgtccggaccgccggttaagatgacaaccttgacatcgtccatagcttcgatctcagtcagagccgtgtttaactcgtcaagagtctcactgtttaatgcgttaagagctgctggtctggaaatggaaagaacagcagtctggtcagcgatttccaatttcaaattgttaaattcactcattctaaaaccctcctgaatagtttgataaaaaattaacaaattactaatattagagtacagcgttttctaaaatttgtcaatagaaaacagtattttcatttggaaagaaagggggtataataaatcctaaaatgagtacgttactaaggagtcatacatatgagcacaaagagatcttatctgtcaaaagttgttgtggagatgccggattccggtattaaggattttttcgatattgccaataccatggacggggctctgtctctgggcgtcggggagccggacttccagacgccggagcatgtcagggaggcggcggtcgcttccatccggcgcgccgagacaaagtataccgacaaccgcggtaccgtggagctgcgtgcggcggcagcggagtatctggaaaagttcgatctgcactatgaccgggcggatgagatccttatcacaatgggggcaagcgaggggattgatctggcgctgcgtgcgctggtggatccgggagacgaggttctggtggttgagcctgcctatgtgtcctacatcccctgcgtggaactgtgcggaggaattccggtgtcaattccgctgcaggcgaagaaccggttccgtctgacggcggaggaactggaggagaagatcacagagcggacaaaagtgcttctcatctctttcccgaataatccgacgggcgccatcatggaaaaggcggatctggaggcgatccgcgaggtagtgctcgcccatgacctctttgtgattacggacgagatctatgcggagctcacctacggcaagaagcatgtgtcgatcgcggcactgccggatatgtatgagcgctgcgtggttctaaacggtttttccaaggcgtttgcaatgaccggatggcgtatgggtatcgcggcggggccggcggaggtcattttccatatgaacaagatccaccagttcacgacgatgtcagcgggaacgacgtcccagtatgcggcattagaagcactcacgagtccggtgcgggacgaggagatcgatgtgatgcgccaggagtatgacgagagacgccacctgatggtggacggattccgggcaatgggacttaaggtggttgagccggagggagcgttctatgtgttcccttcgatcaaagagaccgggcttacctcaatggagttctgcagaagacttttgcaggagcagaaggtggcggtgataccgggagatgcctttggaagctgcggcgagggatacatccggtgttcctatgcatattccaaggatgtgataaaagaatgcctcgaaaaaatcgcggtatttgtggcgcagtttgatctgaataagaatgcgcagcagtaaagagacggagaaaagaatgctggataattatcatctgaatcagttggcagagcccctgctcgtgtggtttctggatcatgcgagggtgctcccgtggcgtgagagaccggagtcttaccgcgtgtgggtctcggaaatcatgctgcagcagaccagagtggaggcggtaaagccctattatgagcgatttttaaaagcattgccggatgtggcagcgcttgcagcctgtccggaggatcagctgatgaagctctgggagggcctgggctattacaaccgcgtgagaaatatgcagaaagccgcagttaccgtgacggaggagtatggcggagtgcttccggcggattatgggaagcttctggagttaaaaggaattggttcctacacagcgggtgccatcgcatcgatcgcctatgggataccggtgccggcggtagacggaaatgtgctgcggatcttgacgcgcgtggcggcagatgataccgacatcatgaaacagtcgttccgcagtgcggtggaagcgcagctgggggagatgatgcgggaacttacggttccggaggagcttcggcgtgcccttcgcgatgaaaatgttcccggcgcgctcaaccaggcgatgatggagctcggggcgacggtctgtgtgccgaacggcgcacctctctgtgaggaatgtccgtggagtaagatgtgccttgcgagagcacaggggcgtgtgatggattttccggtaaaaagcaaggcgaaggcgcgccgcattgaggagcgcacggtgcttgtcatccgggatggagaaaaggtggcaatccgcaagcgcccgaagaaggggctgctcgccggactgtatgagctgccgaatctgtctggcgcattaagtgcggaggaagtcctttcctatgtaaaggaacagcagtttgctccgctgcgaatcgagaagcttgcggatgcaaagcacatattttcccatatcgagtggaggatgagtggatatgccattctggtggaggaagccggctttgccgcagaaaaggaaccggagtcaggaaatgggcgcaccccggaagagaaagcggacggggaaggcggactgatttttgtggatgcatgggatgcgagagagcgttatgccattccgtcggcattttcagcatatgcgggttatttaaaaaaggaatttgattaagatcaagaaagataaaaaagtttgtaaaaaagagggagccggtgcattgcaccggcttttcatatgaaaaagattgtgtgtatggaaagtgaaataaattcactatctgctgggaggaaccttgcctatttctaagcaaggtgacctgacaagcacttgtcaggaatgaaaaagttctatgaaaaatttaacttgctgtcttaactttatctatactataaaatggaaatatgaccagcgtatgccaagtttattagtattttgtaaataaaatatgaacaaataaatgacagggatttttgtttagaaaaccttaaggaaaaaataaattggcgtactgtggaaaatcctgtataatgaaacaggtcaatgttaagacaatgcgggcagtaccgcagaacggaggagacatgtacgattgtattgtcattggagccggaattgccggagcggtggcagcgcgaaagctggcagaggaaaaaggaaagcgtgtccttgtcatggaacgccgaccgcatatcgggggaaactgttacgatgagaaagatgcccacggcattttaattcataattacggaccgcatatttttcacacaggtctggaggaagtgtttgcatatttatcgcgttttacggactggtacctgttcgggcacgaggtggtcgcaaaggtcggggatcagctgattccagtgccgtttaacttaaatacgttacatatggtatacgggaaggagaaagccgaccggctggagcaaaagctgatcgaaacctacggcgagggttcgcgtgtgccgatcatgaagctgcgcgagaacgaggatgcggatatccgcgagattgcacagtatgtgtatgagaatgtatttttatattacacgatgaagcagtgggggcagaagccggaggagatcagtccggaggtcacagggcgtgtcccggtgttaatctcctatgataaccgctattttcaagataagtatcagggagtgccggcgaacggatttacggaaatgtttgagaagatgctttcccatccggggatcacggtggggtgcggcacggactgcttaagccgcatgcgctttgcggacaatgagatttattttgacggcgaaaaattcgacggcgacgtgatctacaccggcgcgctggatgaattgtttgcatgcaggtatggaagactgccgtaccgctcgctggatttccggtttgagcattacgacggggcgtcttaccagggacacagtgtggtcaactacacggtgagcgaggattttacccgtatcacggaattcaagtttttgaccgggcagaaggatacggacggcaccacgatcgtgaaggagtatccgtttgcgtatacgggagcagagggagagattccgtactatgcgattttgaatgaggaaaatcaggcgctgtacgaaaaataccgggcgctcacggcgggcatggagcattttcatctgctcggacggctggcggagtaccgctattacaacatcgacgcgatggtgaagcgcgccatggaactggcagacagattgtaagagtgtgacggaaaatctgccttttgggaagaaagccgggttttcttttgcggagataaaggagagattagaaaatgaaattgttgacatttgcgattccgtgctacaattcggaagcatatatggaaaagtgtatcgagtcgctgcttccgggcggggatgatgtggagattttgatcgtggatgacggatcgcatgaccgcacggcagagattgcggatgcgtatgagaaaaagtatccggggattatccgggcgattcatcaggagaacggcggccacggcgaggcggtcaatacgggtatccgcaatgccaccgggctttattttaaggtagtggacagtgatgactgggtggatctggacgcctaccgcaagattctggataagttacgggagatttccggcggtgacagagtgctggatatgtttattgctaattatgtatatgagaaagagggagtgaagcataaaaaagtcatgcgctgctccaatctcccgaaagaccggatatttacatggaaggaagcaggacatttccataagggacagtatattctcatgcattccgtgatctaccgcacgaagcttctggtggaatgtggactggaactgccgaagcacaccttctatgtggataacatctatgtatacaagccgcttccgagtgtgcggacgctctattatatggatgtggatttttaccggtattttatcggaagagacgatcagtccgtcaatgagagagtgatgatttcccgcattgaccagcagatccgtgtgaataagattatggtcgatgcgtttgacctgtggaaaattccaaaccgcaagctcagacattatatgttcaactatctggagatcatcacggtcatctcgacgatcatgctgatccgctccggcacggaggagaatctggagaagaagagagaactctggaaatatattaaggaaaaggatattcgcctgttccaccatctgcgtgcgggtatccttggcaatacgatgaatctgccgggaaaaggcggaagaaagatctccgttgcggcgtataagctttcacagaaagtggtcggattcaactagcgggaatccctgcactgtatccgggagatagttttgagaaaatacatgatcttaaagttccagatgtaaccggcggcagcattctgaccgcaaaatccggtatttctaaccacaccgcgtccggcatctttgatgatccgtgtctttccaagctttgagcactccgcaggatgtgtccgcaagccggcagacaattttaggacttttgtgtggcgcttattcgccccagacaatagctggcataaatgccacctttatgtcgaacaaaacataaccgcgcgaagccgatgtttgaattggcatctgccttattttcaatagcagatgccaacgagtttcggttcgcgcggttttatattgtctgtgaagaagtggcattagcgccactagaaagtccgcccattgtctgtgggttgtcggacacaccctgtggattgtcaaagcgtggcaaagacacggaatttgatgtcggacgcggcatggaagaaacactcgaattttgcttcaaagaatttgtcgccgccggttacattctggaactttatgcacacgcattgactgaaatatactcttccagatacagagcagggattgcctgctattaagaatccatactcatctcgtttaaaagagccgttttcatatcgtagagcttctgggagaggtcgacgtagatctcctgcgggttgacgaaacgcttggtctcatcccagatggtgtctttttcatggttacagatttcacggatctccatgacgcccggcgaggtgtagatggtttttccggcctttattaccggaatcagcatctcacgcaacgtgtagcttcctcccgggagtctcgtctttttccagggagcgttcggatcaaacagctttaagtcttcgctctcgtcgaatgtctcatcgtacaggcagatgagatcggccttgatcttgccggtctttttgtcatagacgcggtaaaatgtcttgttgccggggttcgtgactttttctacattctcagataacttgatcttcggctggaaacttccgtccgcggtgcggatggcggcaagcttgtagacaccgccgaaggcagggttgtccttcgaggtaatcagattggtgccgacaccccaggagctgatggctgcgccctgcagttttaagctttcaatcaggtattcgtcaaggtcgttggaagcggagatcacggcgtccggaaaaccggcttcatctaacattttgcgcacctgcttggagaggtaggcaaggtcgccgctgtccatgcggattccgtaataagtcagcggaataccggcatcgcgcatctcggtgaagacacggatggcattcggaataccggattttaacgtgtcgtaggtatccacgagcagaatacatgcggacgggtagagctcagcatatttgcggaaagccgtgtactcatccggaaaactcatgatccagctgtgggcatgtgtgccgagtaccggcacatggaacatctgaccggcgagaacattggaagtgccgttgcagccgccgattacggcagctctggcaccgtaggtaccggaatccggaccttgtgcgcgccgcagaccaaactccatgacattatcgcccttggccgcgtaacagacgcgggcggccttggtcgcgatcagacactggtggttgacgatatttaagatggcagtctcgattaactgtgcttccatgatcggagcgacaacttttaccagaggctctcgcgggaagatcaggctgccttccgggacggcgtagatgtcgccggaaaatttgaaattgctcagatattccagaaaatcttcgtcaaatattttcagactgcgaagatagttgatgtcgtccgcgtcaaaatgcagattctcgatgtagtcgatgacctgcgctaaacctgcgcagacggaataaccgccgtcgcagggattgctgcggtaaaaggcgtcaaagacgacaacatcctgattatgatttttaaaatatccctgcatcatggtcagctcatagagatctgtgagcagggtaaggttcaatgtactcatgtgtgtctggaaccaaagttccgctcctttcctgttttgagattggaactattataacataatcgttgagaaaatgtaggaaaagttatatagttaaggtattctgaaagaaatgtgaggcagggaatgggatgagaagagagcgtgcgatggcactgtttgaagaaggatataattgtgcgcagtcggtatttctggcgttttcggatttacatggaatggacacgcacacggcggcggtactcagctcgtctttcggcggcggaatgggaagactgcgcgaggtgtgcggagcggtcagcgggatgtttcttacggcgggcatattatacggctatgacgacccgggcgcccgggaggaaaaagcggcacactatgcgagaatccaggaactggcgaaggcgtttgaggaaaaaaacggttcgattgtctgtcgggaactgcttggtttatcggtaaagcgggaagaaccgacaccgaaggaacggactgccgagtattataaaaagcgcccctgcaaggaacttgtcggggatgccgctgagatattggaaaagtatattgcagaacatccggtggatgagaggttagaaaagagaggaacagtcagatgatgattcgcagagcagctatacaggatctggagcagatcatgcagatatatgcgagggcggtgcagtatatgcaggcatccggcaaccccaaccagtgggtggcggggtatccgtccaggacgttgattgaggaggatatcgcacgcggagtcagttatgtagttgacagggacagtgtgattgaggctgtgttttcctatatagaaggggaggatccgacctaccggcagattgagcaggggatgtggcgcacgaatggaagttatggaaccgtgcaccggctggcatccgccggacggctccgcggcgtggcgggaatctgcttttcctggtgtgccgagcaggcaaaattacacgggtgcagcagtcttcgggctgacacgcatcaggacaaccgcattatgcagcatttactgcaaaaaaacggatttgtgtactgtggggtgattcatctggcaaacggcgcgccgcggctggcgtttgagcgggttgccgtggcgctggaaggagcatatgcagggatgcagaatccgaacagaatgaacccgggaggagcatatgaagggacgccgaatgcgaatggaatgaatccgggaatgccgcaacagaaacagaaaggcgatggcagaggatatggcattgcatcgcttatacttggaatcgtgtctgtgctgctgttttgtacctgcatcaactgggtgacgggaattctggcgattattttcggaatcattcagatcacgaaaaataaggagcaaggtcttgcaatcggtggaatcatcacagcggcgatctcaatggtgctttctgtcgttttatatcttgccatgtggttcggaatgacaaatgcggggattacatacgaagatctcctatacgatcagtatgatgacagctatgacagcgatggaagtgatccatggtacgacggcgatggaaatggcagttatgatggcggaggaaacgacggatggtatgacggtggcggaaatgacggatggtatgacggtgacggaaacgacggatggtatgacggtgatggcagtggcggctacgattactataatgatccctacgattattttagagattactatgacgttcaggagccgggcggcaatcagtttatgtgagcgttttcggcaatgaagtgatagcatcgcgcttttcggaatatactctaagtgacagagcataaaggtcagagtagaagtgcggatagcaggaagctggttttataataaaaagaaaagaggcagactgatctgggtggcagcaggaatggcatgcatggcggcggggtgttgtgcggctttttacatgcaggtatccctgcgtgtgccaacagaggccagggaggcgatggcgatggatgaattggcaaaaaaagtggcaattacatttgatgacggacctaatccggactatacggagatgcttcttgcggggctgaaggaacgtggtgtgagcgccacgttttttctgttgggaaaagaagtggagcagtatccggagattgtgaagaaaatccatgagggcggacatctgattggaacacacgcctatgaacatgtcaatctgagcaatctgaccgatgcggcggcgatcgagcaggtggataagacgaatgcagcgattcatgaaattatcggcgtgttcccggagtatatccggccgccgttcgggtgctggaaaccgaatctggattatgagacgacaatgattgaggtgctctgggatgtcgatccgaaagactgggcgacgagcaactcatcggtcattgcgcagcgcgtgttgggggatgtcgaggagaatgatattattctgcttcatgatgcgtcggagtcgtccgtgctggccgcatttaagatcatcgatgaattgaaggcacaggggtatacatttgtgacggtggaggatattctgctggagtgagacacggtgggacttgcaaccctcttctcaatttgttacagtatagaaaatgatttccggggaaaatcgtgcacaacagagaaaatacatattttacttgtaaaaagggcatgtatcgtgtattgtaatagaagcgatgcaatttttgagttgcaatctgtcatattttttggaaaaagcatgattaaaactacgaatcattaaaaaaatgcaagttttgtattgagaaaattcaaaacggtcaagtgtacgccacgtgcggacatgcgccggaaggcagtgaccgggaatttttatacatcagaaagcaggttttgacatggacttatttgaatatatgagagaacagcaaaaggagacggaggcgccgcttgcatccagacttcgccccacgacgctggatgagatggtggggcagcagcatattataggaaaagataagctgctgtaccgcgcaatcaaagcagataagctaagttccatcatactgtacggtccgccgggaacgggtaagacgacgcttgcaaaagttatcgcgcatacgacaagcgcagagtttttacagatcaatgcgacttctgccggcaagaaggacatggaggaagtgatcgcgcaggcgaagaacaaccagggaatgtacggcaggaagacgatcctctttattgatgagattcatcgcttcaataagggacagcaggattatctgcttccattcgtggaggacggcacgatcattctgatcggtgcaacgacagagaatccgtattttgaggtcaacggagctttgttgtccagatccatcatttttgaactgaagagcctgtcgaaggaggatatccggacattgattctccgtgcggtaaacgaccgggaaaagggactgggcgcttacgatgccgtgattgatgacgatgcgctggaatttctggcggatgttgcgaacggggatgcccgcgcggcactcacggcgatcgaactcggcgtgctgacgacggagcggagtgcagacgggaagattcacatcacgcttgcggttgccagtgaatgtatccagaagcgcgtggtcaaatacgataagtccggggataaccattacgacacgatctccgcttttattaaaagtatgcgtggttccgatccggatgcggcagtctactatcttgcacggatgctgtacgcgggagaggacatcaggtttattgcaaggcgtatcatgatctgtgcggcggaggacgtcagcaatgcagatccgatggcgcttgtggtcgccacatcggcggcgcaggcggtggagcgcatcggtatgccggaggcgcagattattttagcgcaggcggtcacctatgtggcgagcgcaccgaagagcaattctgcggtctgtgccatcagcgatgccatggcggcggtgcgggataccatgacggcgccgattccggtgcatctgcaggatgcacactataagtcatcacagaagctgggacacggcatcggttacaaatacgcgcacgattatccgaatcattatgtaaagcagcagtatctgccggatggtctgaccgaccgcacgttttatcatccgtcggagaacggctatgagaaaacgatccgggaatattttaataaaataaaagggatgcagccttagaaataaggttcatataaaatgtatatacagatagcaggaggaaggaacaatgcagtcatatcaggagatgagcaaagaggaactgttaaaagagaaggaacatctggaagcagaatacaagaagttccagcagcggggattgaagcttgacatgtccagaggaaagccatcccaggaacagctggacctgtccatgggcatgatggatgttctctcgtcctattccgatctcgcgtgcgaggatggaacggactgccgcaactacggtgtactggacggaatccaggaggcgaaagtgctgattggcgatatgatcgagtgcaatccggaaaatatcattatctacggcaattccagcttaaatatcatgtacgatacgatttcacgctccatgacacacggtgtgatgggaaatacgccgtggtgcaagcttgacaaggtgaagttcttatgtccggttccgggctatgacagacattttgccatcacggaatattttggcattgagatgatcaatgttccgatgcttccgacaggaccggatatggatatggtggaggagcttgtcagcaaggatgaggcgatcaagggaatctggtgtgtgccgaaatactccaatccgcagggaattacctactcggatgagacggtacgccgttttgccagattaaaaccagcggcaaaagacttccgtatttactgggataacgcttactgtgtacatcatttatatgatatggatcaggatcatctgatcgagattctggcagagtgtaagagagccggcaatccggatatggtatacaagttctgctcgaccagcaagatcagcttcccgggttccggtctggctgcgattgcaacttctgcgaacaatctggaggatattaagaagcagttaaagatccagacgatcggtcatgataaggtgaatcagcttcgccatgtgcgcttctttaaagatgtgcacggtatcacggagcacatgagaaagcatgcagcttccctcagaccgaagtttgagatgattctggacacattcgacaaggagttaaaggatctcggcgtcggaagctggtacagcccgaaggggggatattttatcacctatgagacgctggagggatgcgcgaagagcgtggtagataaggcgaaaaaggcaggcgttgtgatgacaccggcaggagcaccgttcccgtacggcaaggacccgaaagattccgtcatccgtatatctccgtcgtatccgtcgctggaggatcttacaacggcaacacagatttttgtagtctgcgtaaagctggcaagcattgagaagattctgggggaacagcaggcgtaagcgcgtgagcggggaatgatatgaaaaaaataattggaatagtgacaccgattcttctgctgattttaccgtatctgctttttgtggttctgtctgtgggcatgggaagaccggacagagattcgtctggagcctatatcatggcgggcgattccagattgcagatgacgcagacgacaatctgcattgtctacacggtggtcgtgctcttaaatgtcgtctgggtcatctatcagacggcggcaggaaccagcgcgcaggcgctgcttctgtgggatatgctgatgaagctgtgctatatcccgtattatctgctggcggcgtttatggtgctggcgggatttgcgacgtttatgttcggcggagccgcgattatcggcgtgatgtggattgcggatgtcctgtttttgataccgccgtccatctatggactgtgcggctgcatccgggcgtgcagtgaaaaaaagctgtccgtgggggcagcagttgccctgtcgatactgcactttatctttgtgctggacgttgtggcggcggtcgtcggattctgtaccgtatacggcagacacaaacgtcagaaacagatggaggctgccagacagcaacagatgccataccgggattgaacaagtgaatgcaaaacataaccgcgcgaaccgaaactcgttatcatctgctattgaaaacagggcagatgataactcagacatcggcttcgcgcggttatgttttgttcagtggtgccaacaaggggcacacacaaaagtcctaaaattgtctgcagtttgtggacacaccacgtggaatgttccaaacttggaaaaacacagatgttcaaggatgttcgacgcggcatcgttagaaataccggattttgcgattagaattgccgccccggttgcatttggaacgtcatacatctctattacttataagaaaacgtatcccgttttaaattcggattatgcctgcgtctgggcagcctccgtctcctcggttccgttcttccacttgttgaacttctccacaacggcatcgtaggtgcgctgtgagatgtccggaagatcctgtccccaggacttggttgcttccttgaatcccttcttgaaagcgtcaagaagaagatcggctttttccggatcgttgccggaaagtgcttttgcaaaatcaagaatacggtctgaagtctggtcgacgccccagtaaccgtcatcggcaatatctgcctgtgcctgtgccctggtggcttcatctacggtaaaatcaccttttgcaaggaagctccacatagaatcagcggtaccgatggcaacaccctgcttggtcatcatcttttctacaagactgcgaagctgggaggtacgctcttcggcatctgcctttaacttgttgacaagtgcgtaatcggttttctttgtaactgtgccggatgtctgatcagaactcttctcatatacgacaccggtatcggtctttgtgctgctctcgctttttttctctgtatagtccgtctttgttgcggtataagtagaagcctgctgtgctgctactgagtttgtgatactgttaattgccataattcattcctccattcccttggatcggtttaaaataattgacaggaggcatccatgcctgctctttgtctcatcttctatatcggcaggaagcattgcccggtttagatttttgagaaattttattgcgtaaaaagaaggagagataattgaccttttggacaagtcatggtaagattcagtctgtatacaaaatacattaaaaaaacatgggggcattatgaaagagatttcggtaaaagcactggcaaaagtaaatctcgggcttgatgtggtgcggaagagagaggacggctaccatgaggtgcggatgatcatgcagacgatccacctgtttgaccggctggagattatgcgcaatcaatcgggcaggattaccatgtcgaccaaccttgcgtttctgccgacaaatgaaaacaatctcgtatacaaggcggcggcgctgctcaaagaggaatttgacattggggacggtattgatgtaaagctgcacaagcacattccggtggcagccggcatggcaggcggaagcacggacgctgcggccgtattatatggaatgaaccgcatttttgatctggggctttctaaggaggatctgatgacgcgcggtgtgaagctcggcgcggatgttccctactgcattatgcgcggaacggcgctcgcggaggggatcggtgaaaaattatcggcgcttcctccgatggtcaaatgtccggtgctgattgccaagccgcagatcggggtttccacaaaatttgtctatgagaatctgaagctggatgcggataccgtgcatccggatattgatgggctgatcggtgcgatccgggcgaagaatctggagcagatcgcaggtcatatgggaaatgtgctggagacagttacgattcccaattatccggtcattgcagagatcaaggagcatatgatggagcacggtgcagtccatgcaatgatgagcggaagcggtccaacggtctttggcctgtttgccaacggggatacagccgtggctgcatacgaggcaatgcgtgaatcaaatcttgcaaaacaggtttacctgacaagcatatacaacaatgcgcggtgaggagaagacgggcagaaacagataacaaagcagaaggaggtacttatgacagaggatctgacattgaacatgaatgcataccttccgcttcgggatgtggtgtttaacacactgcgggaagcgatcttaaaaggagagcttaagccgggggagcgtcttatggagctgcagctggcagcaaagcttggggtgagccgcacgccgatccgtgaggcgatccgtatgctcgagcaggagggactggcggtcacgattccaagaaaaggtgcggaagttgcgcggatgacggaaaaagacatggaggatgtcttgcagatccgggatgcactcgacgaactggcggcatcgatcgcctgcgaacagatttccgaggaggagcttgctgagctcagacataccatgcatgagttcgaggaatccacaaagacgggggacgtcaagcggattgcggaggcggatgtgcggtttcatgacatcatctatcatgcgacgcgcaacgtcaagctggagaacatgctcaacaatctgcgggagcagatgtaccgctaccgcgtggaatatttaaaggatgaaaagaatttcccaattctgatccgggagcacagccagatcgtggaggggcttaccgcaaaggataagaccatgctgacggcggcgatgcacaagcacgtcatgaatcaggcgacggcggtgaaggaaatgatacgggaacaggaaaagtgaataaatttcccgaaatggaacaaactaacagggacaggcggatgcctgccccgtttttgttttaggaaaggaagaaaatctgtggcggagaagacaaagatcagcgagagactcgacgagaacatcgcacatatggaggaactgtttcacacctgtgacgacatcaagaagaagcgtatgaatcttggaaaaaaccgggacgtggcgtgctacctcacgttcattgaagtctcggtagatatgggaaattcggcgctgttagaggttttaaaatacttaagggggctggagcgggaggagattctgcgggtgttggaacagaatgccctcggaatctccgatgcaacctattttacgacgatcgaggaggcgggggacggtcttttgaccggagaagccatctttttcgtcgacggttttgcgaaagcggtcaagattccggatgacggttatccgaatatgggcgtcaatgaggcggactcggagaaagtggtgcggggatccaacgagggattcggggattcggtaaaacagaatgcggcgttgatccgcaagagaatccggtcgccgcaggtcaaggtaaaagagaaaaaaacgggcgtgcgctccaacaccaacgtctatctggtctatatggaaggaatcgtctatcccgagctggtggcaaagattgaggagcagctgaacggatttgagattgacggggtactcgatagtggagtcattgaacagctgtcggaggaaaaatggtattcaccgtttccgcagtttcagacgaccgagcggccggaccgggcggcgatgtccattcttgacggcagagtggttgtgctgtcggacaattcgccgatcgcgctcatcctgccgaccgattacaattcctttatcaagacgagcgacgattactataaccgctgggagatcgcgagctttgagcggcttttgcgctatctggcgtccttttttgccatgacgctgccgggactctatctggcggtcaccaatttccacacacagattctgccgaccacgctcctgctgtcctttgcggacgccaggagcggcgtgccgtttccggcggtgattgaggtgattatcatggaactttcgtttgaactgctgcgggaggcgggagtgcggctgcccggagcgatggggaatacgatcggaattgtgggcggactgatcatcgggcaggcagccgtggaggcaaatctggtaagtccgattgtcgtgattgtgatctcatttacggcgctgtgctcgttcgccgtaccgaacgaggagtttgcaacggcgttccggctgctcaagttcttttttatcggaatctgcgcatggctcggctttttcggatttctggcagggctgcttgcggtgctgatccatctgtcgcacttaaaaagctttggcgtgccgtacctgatgccgtttgtggcggcagatctgaatgattatgaagatgaacgcgatttcctgtggcggcagccgcttcggctgctctggaaacgcccgatctacgcgaagaagaataaccgcagaaagctgcggatgaaacagtgacagagagggaacggactatgttttcagaaaataacaggatatcgggacgccagatgtatcggctgatgacgtatgatctgcttggcatcggtacacttctcgtcccgcagatgctcgcgaaggcggcggggagagacggcattctgtcgatcggaatcgggatggcggcagcacttatgtatctttggatattgcgcaggatagcgccgcccgcacaggaatcttatccggaatatatgaagcggcagctgggaagaatcgggggaggaatcgtacaggcaggttatctgatctacctggtgctgcttgcggggtatgtggcatatctgtttgcagacattattctcagggatcttctgcgcggagaatcgttttatctggtcctttcggttatcatgctgctggtgctgtatggacttgtggggggaatagaggggagggcgagagcctatgagatgctgttctggttccttttgatcccgctgtttctcatgctgtttgcggcggcggacgaagtgtgcaccgactactgggtgccgcttgggatgagcagcttaaagggcgtggcaggcggagcctacggggtgtttttgaatctttcttttgcatttctgcttctattttcgggaacgtatgtcaggcggcaggaaacattgtttacggcgggaaagagggcaatcctttttgtgggatgtcttcatgcggtgctctatctggttctggagggaattttcggggtgccggcgcttgcagggatggactatccagcggtcacgctgatgagcacggtaaaaatatccggcggctttttaaaaagaacggatgcgtttatgttcggcgtgtggttttttacgctttatgctcttttaaacagctgcgttttttatggaagcagcatagcagaagaattatgtaaacctattcgaaaaatgccaaaagagaaaaagtatatgtggattttctatggatctgtggcggtggcagcgtctgcggcagcaatctgtttttaccggagtagagaggtattcgactggtacgagcggttcctgtggtatgtcggaacgccgtttctggtgctggcccccgtctttaccgcacagaaaaagtggggcaggaggatgcttgcgcttgcggtgatctgtgcggcagccttgcttgtgatgacaggctgcgcccccgcagagctggaggatcgcgattttccgattgatatcgcggtgcgggacatgaaggacgccgggctgacgtggtatgaagcggagcaggagggaaaccggatggtggattacagccatctgaaggttctgatcctggaacaggaatttgtggaggacgaggcggcggtgcaggagtggctgacattcttaaaggagaagagcgaggtgccgcgcaacgcctatgtggtggtcacggaggatgccgaagcactgctggcgcagagtgagacgctgggagaagcggtcggggattatctggaggaacagtttgaaaatgtgtcccagatcaaaaagcaggcatatcccacaatcggatcgctgtatcaggagatggacaatagacaggagacgctatttttgccgtatgttactgtggaggaggaaaagccggtggtggagcagtattatgtgtggaagcgcgggacgccggcgggcatggttgccggggaggcagcgagactcgcctttttcacgcaaaaccgcatgatggagtatgtcttgccgttagaggagggaatgctgctgctgtcggatgcctcaaatgagatcgcgtttacgaaaaaggatggtgtgcggaaggttgtggtgacgattcactgcagcgggagcgtgcagggaaccggaggaaaggagaatgaaggaaagcttgcactttcagcggaagattatatgaaccggatggcggcaaatgtgcggcaggagaagcaggtggatctgacaggcagctaccggaagctcggaggcgcggcgcgcggctggtatgaggagtaccaggagcgcggggagaactacgaagaagaggtggaggttgtctaccgggtaaaaataaactggattcatttatcgtaaagtgaataaaacagtaccagaacgggaatcgtcttttacagcagaggaaaggaagaaaatgttgtgatgcaaagacgtaaatggatctggtacttgttgttggggatgaatgtgacgctgcttgcgcttcttggaatgcagtatggaaaaaatcagagaatacaggggcagattgctgggaaggtgctgcggttccatgtgcttgccaacagtgataccgtggaggatcagaatttaaagcttgccgtgcgcgatgccgtgggaagccagatggcggagctgctttcggatgtgcaggacagagcagcgtgtgaacaggtggtggaggcgcatctgcccgagattacggagacggcgcaggcggtggtgcgggaagccggatatgggtatgaggtgcatgcagcgatagaggagacagatttcccgtccaaaacatatgggaaatttaccttcccggcaggaaaatatgaggcgctgcgggttgtgatcggagagggtgcaggtcataactggtggtgcgtcatgtacccgaatatgtgtttcgagggaagcatgtatgaagttgtggatgagagcgccggggaggaactgaaaaaagtgctgtctaaggaggaataccgggcggtgcttgaggaggaaaattatgaagtgcgctgccgctatctgacatttttggacggcctgaaagaataggcttgattattccgccaaaagtcggtaatatgagttgagataaagggagtgtaacgatgacaaaagatgtattgatctccatcagcggtcttcagtttgctgggggagaaaacagtgaaccggtagaggtgattacctccggttcttattataagaagaacggcaggcattatattctgtatgacgaggtggcggaggatacggcgggtaccaccaaaaatatcatcaagctcggggatgaggtgcttgacatcacgaagcgcggtgagacgaatgtacatatgatgtttgaaaaagacaagaaaaatgtcacttattattatacgccgtacgggaatctgctgatcggaatcgacgccacgaaagtgcaggtggaggagacggaacacaatctgtccgtgaaagtggattatgcgctggaagtgaattatgagcacatggcggactgcaagattaccatgaacattcaatcaaaaaatgcaggggatttcaaaatctgaaattccctgcattttaaatagctgcttattttttcttctttgcggctttctctttggcaagttctgccttttctttttccagctctgcattggccttcttggctttttcctgcattctcgcgcggaaactcttcttgccctgcggcttctcaagaggtcctctgacgccggttaccttcgtgatgtagatgccgctcacggtcgctttgacttccttcttcagcggaatcagatcatagactgcctcgtctgcgatcagtgacatcaccttcggaccaacctttgcctttacgatcggaagcttggaacggcgcatcatcttcggtgtctggtcgatgacaacctgcggaagtcccgaatctttcagacgcaatcgctttttatcgatgatcagcatggagacggtctgggagttggctgcaagctgcgcctcctgctcgtctctctttttctgtgcctttttgccgagaaaatataatacgatcaagccgacaatgaggacggcaagaataaccagcaatacaatggttacggtactcatggtaaaatcctcctacaatcaaactgcatttaattgtagcattgattcggcaaaaaagcaatcttgtatttgaaacatttgtgaaagtttggcttgtctgcttccttttttgagggaaatgtggtacgatactaaggttagtgttggcgaaacagaattcgccaaaagagggaatagaaagggtatttgtatatgaagaagagaacagtagcactgatgctttgcgctatgatggcatttggtgcagcaggatgcggagcaaaggacgccgatccggcagcgacagaggcgacagagagcgcagcgtcaaccgagggtcttgcagacagtgcggtttccggtacgatcacaagcactccgtgtgcgagcagcgcgtttgacctgaagggaagcgattatgtaacactctgtgattacagcgcgattccggttacgatcaccggggattatgacgtggatgaccagaaggtaaaggattatttcaagcagatgtttgacaactatggtccgttctatacggcagatccggacaagaccacggtcgaggagggagacattgtcaatgtggattacgttggcaagcttgacggaacagcgtttagcggaggtaccgccgagaatcagaacattgatgtgtaccagaacgcatctgccacagggacaggctacatcgacggatttacggacggcttaaagggcgcttccgtcggagatgtgatcgactgtgacgtgacatttccggatgattatggcaacacggatctggcgggaaaagcagtagtctttacatttacggtcaactccattcaaaaggaaatgacgatcgatgatgtggatgacgcatttgccaaggagcagttccaggtggataccgtggatgagatgtacggtcagatccgcagctacatggagagcagtgcagagtacaacaagcagaaagacacgacgaccgcagtgcagaattatctgatcgacaactgcgaggccgaggtgccggaggattatcttgcggcgagagtggacgattacagaagacagtacatcgagcagaactgcaacggagatgagagccagcttgccgattatgtgagcacctactacggaaagaccgttgaggagatggaagcatactggaatgagggaatggagaagagcatccgccttgagttcattatggatgcgatcgcggatgaactcggcgttgaggtgaaccaggacgacatcgatgcatacgcagagcagctggtaagccagaacggatacgagtctgtggaggcgatgtataatatctacggttttggggataccgattatggcaaacgctattttgcagctctctaccgctacgatcaggcgctggatcagctgcttgagacggcagttgtgacggtggatccgtctgcggacacggagagcgacgcggtgacggaagacgctgcggatgaagcagaggcaggaagtgcaacagatgcctctacgacgtatgaggcggcagaaagcacggaagagaccggggcagccaattaggaataagcattgattttttgcggcaatgcagataagataatagaaaagagatagagagtggcagacgggatgcggcagagtggcgcacccgtctgttgcggatggaggaatgtatggatctggtaaatataagggatttatttcgcagcaaggatgagtatctggatacgacagtgaccatcggcggatgggtcagaagtcttcgtaattccaagaatttcggttttatcgttgtcaatgacggtacgttctttgagccggtgcaggtggtattttccaacgtgctggagaactttgaggaagtggagaagttgaacgtcggcgcggcaatcatcgtgacgggtaagcttgtcgcaaccccggagatgaagcagccgttcgagattcaggcggagaagattgaggtggagggagcttccacaccggattatccgctgcagaagaagaagcacagctttgagtatttaagaacgatttctcatttgagaccgcgcaccaacacctttgaggcggtattccgcgtgcgttccctgattgcctacgcgatccacaagttctttcaggagagagatttcgtctatgtgcacacaccgctcatcacgggaagtgactgtgaaggtgcaggcgagatgttccaggtgacgacactggatctagccaatgtgccgaagaatccggacggaaccgtggattacaccaaggacttttttaataaaccgacgaatctgaccgtcagcggacagttaaacggcgagacatatgcgatggcgtttaagaacatctacacgttcggaccgacattccgtgcggagaattccaatacgaccagacatgcggcggagttctggatgatcgagccggagatcgcgtttgcagatctcgaggatgatatgatccttgcggagagcatgctcaaatatattatccgctatgtgcttgagaatgcgccggaggagatggcatttttcaataatttcatcgacaaaggacttcttgaccgtctgaacaatgttgtgaattccgatttcgcgcgtgtgacctacacggaggcaatcgagatcttagagaagcacaacgacaagtttgagtataaggtatcctggggtgcggatcttcagacggagcatgagcgctatctgacagaggagatctacaagcgtccggtatttgtgacagattatccgaaggagatcaaggcgttctacatgaagatgaacgaggatggcaagacggtggcggctgtcgactgtctggttccgggaatcggagagatcatcggcggaagccagagagaggacgactacgacaagcttctggcgcgcatcaacgagctgggacttcgcgaggaggattatgagttctacctcgatctcagaaagtacggttccgcaagacatgcgggattcggactcggattcgagcgctgcgtgatgtatctgaccggtatgtccaacatccgtgacgtcattccgttcccgagaacggtcaacaactgcgaactgtaagagggaagactgaggtggagcatgagatatattttggaaaatgacacgctgcgggtcgagattgaatcgttcggcgcggagatcaagtctgtgaaacgcaaggcggacggcagggaatatatgtggtgcggagacccgaaatactggggcagaacatcgccggtgctcttcccgtttgtcggcgcgccgaagaacaaggaataccggtatgagggcagaacctacccgatgggacagcatggatttgcgcgcgatatggagtttgctctggaggcgcaggagggaaagagcatctggtttgttctctcctccacagaggagacctatgcgaaatacccgttccggttccggctgcacatcggatatacgctggacgaaaatgaagtctccgttcactggaaggtggacaacaccgatgagaagccgatgtatttttccatcggcgcacatccggcatttttgtgcccgatcaacggggaacaggataagacgggctatcgtctccggttcggagatctcaccgacaagctgcatcatcacggcaacacgccggacggcatggcagtcatggtggatgaggagctggaactggaggatggagaggctgtgattacgcctggattctttgacaagtgcacctacatggtggagggagcgcagacgggagaggtgtcaatcctggaccgcgacggcgaagcctatgtgacggtacgctttgatgcgccgctgtttgctctgtggtctccggaaggaaaggaagcaccgttcctgtgcatagagccgtggtatggaagatgcgatgcggttgactttgagggaagcctggcggagcgcccgtacgagaatgcgcttgcagccggaggcagttttgacgcagagtacgcaatcgtgtttgcatagccgcacgcgaaccggcatatagataggatagaaagaatcaggcaggtctatctatgaagctgggatacaaaataaaaccgagagatgcaaaaagcaacccgacgacagccatccttgcagccgtgtttgtgatgttccttataagcggtcttctgctgcttcttctggcgcttctcttatataagatggagccgggagagtccgtcattaagatcggaattgtggcggtctacgtaatttccgggctttgcggaggttttctgatgggaaaacggatgcgggagcagaagtttttgtggggactggcggcgggaatcatctattttctactgctgtttggtgtgtcgctgctcgtaaagggtacgggtgatcttcagatgacgcgcattttttcaacgctgatcctctgcggggcatccggcatggcgggaggaatgttaagctgaaaaagccgctctgtggggcgaaagttcagcaaaaaaaggcttttcatctaaccggtcatgtgctatactatacgggttaatagaattttattgtaagatataaaggagagattattatgaagcacgttaagacattaaataccagaaagttacagaacaccatcaagaagggcggatgcggcgagtgccagacatcatgtcagtctgcatgtaagacatcctgcaccgtaggaaaccagagctgtgagaacagataatttttcacgggcataagtgaatagcattacctacagacgaccgttcgcgaagcgtgcggtcatttgtacgttataatagtcagaattagaaagagaggaaatattatagtggttcatcagtataagaacaacggctatgatattgttctggatgtaaacagcggcgcgattcatgtggtggatgacgtgacatacgatgtcattgccctgtatgaaggacatacaagagaggagattgtgaattctctgcgggagcgctatccggagactgaagtggaagaggcacttgatgaggtgcagatgctggtcgacaatgaggagctttttacgaaggatacctacgagaactatatcatggatttcaaaaagcgcccgacggttgtgaaggctctgtgcctgcacattgcgcatgactgcaaccttgcctgtcagtattgctttgccgaggagggcgagtaccatgggagaagggctcttatgtcctttgaagtcgggaagaaggcacttgattttctgattgccaattccggcaacagacgcaacctggaggtggattttttcggcggggaaccgcttatgaactggcaggtggtcaaggatcttgtggcatacggcagagagcaggagaagcttcacgacaagaagtttcgctttacactgacaacaaacggtgtacttttaaatgatgaggttatggaattctgtaaccgcgagatgggcaatgtcgttttaagtattgacggacggaaggaagttcacgataagatgcggccgttccgcaagggtgcgggaagctacgatctgatcgtgccgaagttccagcagttcgcggagagcagacatcaggataagtattatgtgagaggaacctttacacattataatcttgatttctcggaggatgtgctgcatcttgcagatctcggattcaagcagatttcggtggagccggttgtggcggagccgaaggagccgtacgcaatccgggaggaggatctgccgaagctcttcgaggagtatgacaagctggcagttgagatgatcagacgtcataagagcggagaagattttaatttcttccactttatgatcgatcttgagggcggtccgtgtgtggcgaagcgtctttccggctgcggttcgggaaccgagtatctggcggtcaccccgtggggcgatttctatccgtgccatcagtttgtcggaaatgaaaagttccttctcggaaatgtcgatgagggcattttaaatacagacattcgcgacgagtttaaatgctgcaatgtctatgcgaaggagaaatgccgcaagtgtttcgcaagattctactgcagtggcggctgcgcggcgaatgcctacaatttcagcggcgacatctgcggagcatatgacatcggatgtgagcttcagaaaaagcgcatcgaatgtgcgattatgataaaagctgcagaggaggaacaaaagaatgaagaagagtaaagcgattgttattttgatcgtgatccttggtgcactggcgggacttgcttattatgcatccatcattctttcttcgacgggaatcggggaagagatgagcattccgcttggtctggatttatccggcggtgtttccattacctatcaggttgtggatgacaatccaagtgcggaggatatgagtgatacgatctacaagctgcagaagcgtgtagagggctacagcacggaggcgtctgtctaccaggtgggagatgaccgtattacggttgagatcccgggcgtatcggatgccaatgcgattctggaggatctcggtaatccgggttctctggagttccagcttccggacggaacggtttacatgacgggtgaccaggttgcggatgcgcaggcgggaaccacgacagacagctacggcaacaagcagtatgtggtacagttaaagctcacagacgacggagcaaagctgtttgcggacgccaccacagacaatgtcggcaattatctgccgatcgtgtatgacggcgagacgatcagctatccgcaggtaaaggaagccatcaccggcggtactgcacagatttccggcatgaagacatatgaggatgccgagacactggcaacacagatccgtatcggttctctttccttaaagctgcaggagctggaatccagcgttgtaggagcacagctgggaagccaggcgatctcttccagcttaaaggcagcagccatcggattagtgatcgtcatgatcttcatgatagtgatgtatcagattccgggtctggcggcagccatcgcgctggcaatctatacctgtctggtaattgctacattatacttatttgagattacactgacactgccgggtattgcgggtatcatcttaagtatcggtatggcggtcgatgcgaacgtcattatcttcgcgcgtatccgtgaggagattgcgacgggcaagacggtcaattcttcaatgaagatcggttttaagaaggcaatgtcagccatccttgacggtaacatcacaacgatcatcgcggcgctggtactgattgcgctgggttccggaacagtcaagggctttgcatacactctgatgattggtattgtgctttccatgtttacggcacttgttgtgacgagatggatcctgtattccttctatgccatcggtatccgtgacgagaagttctatggccgtgcaaaagagcgcaggacgttgaacttcctcggaaagagaggcgtattctttacagtttccctggcaatgattgcagcgggatttatcggaatgggtgttcatgcagcaaagggaagcggagcattgaactatggtcttgacttcgtaggaggtacttcaacgacagcagactatggcaaggattacacgattgaagagattgagaataccatcgttccggtggttgcagatgtgatcggcgacaatgacatcatggcgaacaaagtggaaggtacgacacagattacggtgaaaacgcgtaccctgacgctggatgagagagatacgctggagcaggcattggtggatcagcttggagcagatgagtcttccatcacatcacagagtatcagctcgactgtcagcagtgagatgcgttccgatgccattgttgccgtgatcgtatcttcgatctgcatgttgatttatatctggttccggttcaaggatatccgtttcggtgcaagtgcgattattgcgctgctgcacgatgtgctggtagtgcttgcggtttattcactgcttcgtatttccgtcggaaatacctttatcgcatgtatgctgacgatcatcggttactctgtcaatgatacgatcgttatttttgaccgtatccgtgagaacctgggcaggacagcagcaaagcagacgccggagcttctggcggaggttgccaacaagagcttgacacagacgctttcacgaagcatcaatacgtctctgacaacctttatcatggtattcatgttgtttttactcggtgttgcaagtatccgtgagtttgcacttccgttgatggcaggcctgctctgcggagcatattcttccatctgtattgcaacggagctgtggtacatcatgagactgcatcttggcaagaacagactgatcaagaaataaaacaaatattaggggctgcaatacattgaccaaagatgtatttgcagtcctttctatttccctgcaggaaaaaggaaaataacgggaagcaggcatgaagaaacgtaggatagcgtgtataatggcatgacgcagagattgaccctgccatatttaccttctggcagtacagtgaaaaagggaagtgtggatggaattgagggagcggtagatctggatgtccagtttgtggagtgacatgaaaacggtcattgaggagaaatgagatggatgggatgaagttgtttgcaatctatttggtggttatgaatgtgctcggtgtggcggtcatgtggtcggataagaggcgcgccagactgcaccggtggcggattccggagaaggtgctctttggcgtgagcctgctcgggggaagcgcgggaacctgggcaggaatgtatttgttccgccacaagacgaagcactggtattttgtggtcggaatgccgctcattctggtttgccaggcggcacttgcaatttatctggtgcacttatatgttttataacaaattgttatagacggtatgtgttttctgattgaataaagatacaaagtcatttataatgagtagcatagccgtagaaagacaaatgttcttcgtagaaagacacagcggcggttcaggaagggagaatacatacgatgtatacaatggaagatatcgaagcggtagatatggaaatcgcacaggcaataaaggatgagtttgacagacagaacagtcatatcgagctgatcgcatcggagaactgggtaagcccggcggtgatgtctgcgatgggaagcgttttgactaataaatatgcggaaggctatccggggaagcgctattacggcggatgcgactgtgtggatgtcgtggaggagctggcaagagagcgcgcgaagaagctattcggctgtgactatgtcaacgtgcagccacattccggagcacaggcgaatatggcagtgcagttcgctgttttaaagccgggcgacaccgtgatgggtatgaacctggatcatggcggacaccttacgcatggctcaccagtcaatttttccggaacctattttcatatcgtaccgtacggtgtaaatgacgagggattcatcgattacgacaaggtgatggagattgcccttgagtgcaagccgaagatgatcattgccggtgccagtgcctacgcgcgcacgatcgactttaagaaattccgtgagatcgcggacgcctgcggtgctgtgctcatggttgacatggcgcacatcgccggtctggttgcggcgggacttcatccaagcccgatcccgtatgcggatgtcgtgacaacgaccacgcacaagactctgcgcggaccgcgcggcggaatgattctctgcaatcaggaagcagcagacaagtacaactttaacaaggcgatcttcccgggaatccagggaggtccgctgatgcatgtgatcgcggcgaaggcagtctgcttcaaagaagcactgcagccggagttcaaggtgtaccagcagaacatcatcgacaatgcgcaggcgctgtgcaaaggactgatgaaccgcggtatcaagatcgtatcgggaggcaccgacaatcacctgatgcttgtcgacctgacgaattttgaccagaccggaaaagcggtggagaagcttctggattccgtaaatatcacctgcaataaaaatacgattccgaacgatccgaagtctccgttcgtgacgagtggtgtgcgtctcggtacgccggcggtgacatcccgcggattcaataccggggatatggatcagattgcggaggcgattgccatgatgatcaagaagggagagccggcggcagatcgcgccagagcgattgtggcggagctcaccgcaaaatatccgttaaaataaaatctttcaaagtgtgtagactaggcttccgtgcatattgtgagtgttcaatatgcgcggaggcttttttaatgttctattctacaaaaattattaagaattaaacgctatgtatcgggtctgaaaagatgatagaataaagaaaagaaagtaacccgtctggggcagaggaggagctatgggcaaaaagagcgttggaattctgatcggtgtggcagcagtggctgctgttctgggaggaaccggttattatttccgggatgatatcaggcagatgataccgatctttgatgatggaagttcagaggacaaggtctatgtggaaaaggtatcccgcattatgaatcagtatgcaggtgtttccaaccggtataacggtgtggtggagacgcaggattcatacgaggtgaatgtggattcttcccggacgatcagcgagatcaaggtggaggtcggcgatgaggtcgaggagggacagactctggtcacttacgacaccagtgaccttaccatgaagattgagcaggcgaagctggagctggaaggcatccagaatgagatagataattacaacaaacagatcgacacactgacgaaagagatggagaaggtggacgaatcggaacgctacgattacaccacgcagattcagaatatccagaactccatcgcacagaagcagttcgatatggagagcaagaagcttgagatctccaaggagcagaaacaggtcagcagttcttccgttgtgagcaaggtggcgggagtggtcaaggagatcaatgagaaaggcgtggatagcaacgggaacagcgcgccgtttatgacgatcttacagaccggagagtaccggatcaagggaagcatcgatgagcagaatgtctggatgctttccgaggggcaggaggttgtgatccgttcgcgtgtagacagtacgaagacgtggagcggaacgatcgggaaaattgacacggagagtccgcagcaggggaatgacaacggttattacagcacctcttcggcgggagacacgcagtcagcgtccaagtatccgttctatgtggatctcgactcggtggacggactgatcctggggcagcatgtgtacatcgagctggatcagggacaggaggaagtgaaggaaggtctgtggctgtacggctcctacatcgtgcaggacgaagatactccgtacgtgtgggcggctaatgagaaaaaccgtctggagaagcactatattgagctgggagagtacgatgcggatatggacgagtatgagatcgtatcagggcttgccgaggacgattacattgcctggccgatggctggtctctatgagggtgtgacgactgtgaccgacgaggcggaagtggattattcttctccgctttacaatcagccggcggacgagaatctgtacgatacagagggtgtctatgacacggaactgctctatgatgtgttggacagcgtctatgatacagaactgccggatgaaatgtatgacggtatggatgccggagaagggacagaggcggaggtggcagaatgatactgaatctgcagaatatctacaaagactatcagcaggagaagctggttgtgccggtgttaaaggatgtatcgctgacggtcgaggaaggagagtatgtcgccattatgggaccgtccggttccggtaagaccacactgatgaatattatcgggtgtctcgaccgaccgacgagcggtacttacgagctggcgggggagaacgtgctcaaattaaaagacagggaactctcggatctccgcttaaagagcatcgggttcgtgttccagagttttcagctgatgccgcgggagagcgccgtggaaaatgtggcgcttccgctcagctacgccggagtgcgcaaaaaggagaggcggatccgcgcgacgaaagcgctcgagagagtgggactcggggatcgtgtcaatttcagaccgacacagctttccggcggacagaagcagcgtgtcgccatcgcccgcgcgatggtcaaccatcctaagattctgctggcagatgagccgacaggagctctggactccaaatccggcgagcagatcatggagctttttgacagcctgaacgaagagggcgttaccatcgtcatgattacgcatgatcccaggattgcggcgaaagccaagcggattgtccggatcatcgacggtgagatctatgagggagagggggacggagcggtatcatgaagattaagaaagtgattgcggtcatcgcaggtattgcggtcaccctctcggctgcggtgggaggcgtatacgggtataagtcctatcaggacaaaaagcttatcgcggaagtgcagccggtttccagcctcaactggggatactggggagacacggagacaagttacggcaccgtcacgaacgattcctcacaggagatctatctggatgattccagaatgatcaaggagatctatgtggagaagggggatgaggtgcaaaagggagacccgttgctcgcctatgacacggcggaactccagatagagattgaacgcaaaaaactcgatatcagcacgatcgagaataacatcgagagacaaaaatacaagtatgaaatgttaaagacgcagacgccggtgaaaaaagatccgccgaagctgaacgaggagcagcttgcctggtatcagcacatggacgaggaaaaccgcctgacagagacagataagaacgacagcagaatctacaactatctgacggcggcctccattccctacaacgtgacaaccaatgcggcgggggaactggtgtatccggcaggaacagcggaagaaccgtatatttattatgtcaaccagaatgcatacgcctacggcggctttttcaatgccatccgtcctaccgcggagggaggcagcggaaaacatgtgcgcgtgatcgtctgcaagaaggatgcggacggtaagatggtgcttgacaccgatgaagcgaccgggcggcagacgccggttgcggatgatacagtgtccccgaataccgtcgagttaaacggcagcgattttccggcggattacgatgagagccgcatgtggtatctgttttcgggaaaagaatacataccgacctcccttgcggatgagtacatgcaggcctacgaggattttatggcggactgggaggtgccaaagggatatacttccgaggaactctatcaggaggctgccgagattgaagaaaaattaaagacgctcgatattcagcgcagacaggaacagctggcgctcgagtccatggagaaaagtgcgacggacggtgtggtctacgcggaggtggacggtgtcgtcaagacgctcggtgatccggacgagaagcccgagcaggggcaggcgtttctggtgataaccggagatgacgggctctatgtaaaggggacgatcagcgagctgcttttggatgatgtgaagatgggaaccgtggtgactgccaattcatgggagagcggcatgacgtttgatgccacaatcacggaaatatcggattatccggtttcgggcaactcgtggggcgatggaaatcccaatgtctcctattatgagtacacggcttatatcgaggacagttccgcgctccgcaacggggaggcggtagatctgtccatatcgaccaatcagtccgatggcggcggcatttttatagaaaaagcgtatgtgaggtcggaggatggaaaggcgtactgtatgattgcagatgagaataaccggctgaaaaaacagtatgtggtgaccggaagaacggtgtacggatctgcggtagagatcaagtcgggtctgacggaggacgaccgcatcgcattcccgtacgggaaaaatgcggtggagggcgctgccgtcacggacgaatcatccaattattaaaggaggaacggagatgtttgaaaatataagattatctttccgcggaatctgggctcacaagatgcgttccttcctgacgatgctgggaattattatcggtattgcagctattattgcgattgtatctacaattaagggaacaaatgaacagatcaagcagaacctggtcggagccggtgagaataccgtcgagatttccctgtatcagggagagtgggaatacgagatggagtacaacggcattccggagggcgtgccgcttgtggcggatgaggtggttgaacagctcaaggagatcccgcatgtggaaaatgtgtcgcgctatctgagccggcaggattacaacggagtctatcatctgaacaccgggctttccggcggttatgtcaagggcgttgacgcggcttattttgacacctgcaattatattatgaaggaagggcgcgggttcacgcagcaggattttgaccagtatcacaaggtggcgattctggatgaggattcggcggacgcactgttccagggagaggaagctgtcggggagacgattgagattcagcaggagccgtatgttgtggtgggaattgtgacaaaggcgaaaaagtttgaaccggtcatcaactcgattgatgactattatacctacgcgcaggattccgccggctctgtgtatgtgccggcgacgacctggccgatcatttatcagtatgacgagccacagaatgtggtgctgcgcgtggagagtacggatgatatgaccagcgccggaaaagcaggagcggatctgctaaacgggtatctgtcggtttcggacacgacgatccagtataaggcaaaagacctgatggagcaggcgcagcagattcaggaactcagcagttccaccaacaccatgttgatctggattgccggcatttcgttgattgtcggcggtatcggcgtcatgaacatcatgctggtatcggtgacggagcggacgcaagagatcggtctgaaaaaggcgatcggggcgcgcaagtcccggattcttggacagtttctgacggaggcggcggtgctcaccagtctgggcggtctcatcggcgtgctggtcggaattattctcgcgcaggtgatctcgtatgtgacgacgacgccggtggcgatcagcgttccggcagccgtgggagcggtggcgttttctatggtcatcggaattgtattcggtgtgttcccgtcctacaaggcggcgaatttaaacccgatcgatgcgctgcggcatgagtaagcaaaaaaaataatgacagcgctgcggacagaaaggagctggcatgataaaaagaattgtcatgatggagggcggagtggagacattatcctatttctcccatcagatggcaggggagtttcaaaaactgggatatgcagtatttttctatgatctgaaacaggaggagagcagcgcgggaaagctgcgcaagtttatcagaccgcgagagacggtgcttgtgaccttcaatttccagggattggaaaaggaggccggcgtgtaccgcgaggggatcggttatctctgggatacctatcatattccctgttataatattgccgccgaccatccgtacttttatgatgacaggttaaaagatctgccggaaaaataccggcatatcagcatcgaccggagacagaaggcatattttgaagagttttatccggagtatgtgtcgcgtggctttctgccgcttgcgggaaccggattgcgggagggagaagacgaagctaagacgggaaaagcgggggcacagggcaccgcagttgagacggaagaagcgggggcacagggcaccgcagttgagacggaagaagcgggggcacagggtgacgcagagcaggcggcgccctgctatgacgtgatcctgaccggaaattacacaaaactttccttttttgaaccctatatcaactggatcaatgaggagtatgcggcattttaccgggggatcatagacgatctgttggaacatccggcctgcacggtggaggaagtggcgcttgcccactgcgagcgggagatgggaaaagagcccaatgatcagctgcggattgccctgcacaaaatgattttcatcgatctgtatgtgcgcaattactggcggggaaaggcggtgcgcacgctcgtcaatgcaggaattccggtacatgtggtcggaaaaggctgggaggaactggaggatgtgagacatccggagtgcctgaagctgcacccgcagaccgattccgttacctgccttgagatgctggtggacgcgaaggtgtctttaaacgtgatgccgtggtttaaggacggagcgcatgacagggtgtttaattccatcttaaacggagcggtatgtgtgaccgatccgagctgttacctggaagaggaacttcatgagggcgagggcgtctgctatgttgcgctgcaggatatggacgctcttccggaaaaagtgaaggatttattgcaaaatgattccgggaggaatgagattgtgcggcgtggcagagcgattgtggagcagaagcatacctgggcacagcgcgcgaagacgctggcagcgtggattgcggaggacgccgcgcaatagataaaggacaaagtgcggaaaatacaggggattcgatgcggactgggcgcggatcgggcgaatctgcatattaaccttgcattttgcggataatcattatataatagcggaagaattggcgatgaagaaagctgcggtttgaagactgcgacagagagccggtgggtggtgcgaaccggtgcaggatagaatctttccacttttggagccggcagtgaaagctgcgagggtcgtatcctttaacatacgtttgagaggtcgcaggaacatgcctgtggcaagatgggtggcaacgcggaagcagaacctttcgtcccatgtgcaagtggtgcccggtcagagatggcggggacatttgacacaggggcgaaaggtttttttgttcctgtgcggatagaacagaagaatttaggaggaaatgacatgatcgatctgaagtttttgagagagaacccggaggttgtaaagcagaacattaagaacaaattccaggatcacaagcttccgcttgtggacgaggtaattgaactcgatgccgaggcgcgcaagacacagcaggaagcagacgatcttcgagcaaagagaaaccagctgtccaaagagatcggtaaactgatgggtcagggcaaaaaggacgaggctgaggctgtcaagacacaggttgcagagggagctgcccgtctggcagaattagaggaaaaagaaaaggaacttcaggagaaagtcaccaagatcatgatgacgatcccgaacatcattgatccgtccgtaccgatcggcaaggatgattcctgcaatgtggagatcgagaagtttggcgagccggttgttccggattttgagatcccgtatcacaccgagatcatggagcgttttaacggcattgatctggatgctgcaggcaaggtggcaggaaacggattttattatctgatgggcgatattgcgcgtgtacactccgcagtgctctcctacgcgagagatttcatgatcgaccgcggttttacctacgtggtgccgccgtttatgatccgcagcaatgttgtgacgggcgttatgagttttgatgagatggatgccatgatgtacaagatcgagggcgaggacctttatctgattggtacctccgagcattccatgatcggtaagttcatcgatacaatcaacgatgaggagaagctgccatatacactgacatcctactctccatgcttccgcaaggagaaaggcgcacacggcatcgaggagcgcggtgtttatcgtattcaccagtttgagaagcaggagatgatcgtagtctgcaagccggaagagtccaagatgtggtacgacaaactgtggcagaacacggttgacctgttcagaagcctggatatcccggtccgtaccctggagtgctgctccggcgatctggcagatctgaaagtgaagtcctgcgatgttgaggcatggtctccgagacagaagaagtatttcgaggttggaagctgttcaaacctcggcgatgcacaggcgagaagattaaagatccgtgtgaagggcaaggatggcagcaagtattttgcacataccttgaataacacggtggttgcgccgcctagaatgctgatcgcgttcttagagaacaacctcaacgcagacggaagcgtcaatgttccggtagcactgcgtccgtatgtcggaggcaaggagaagctgatcccggtaaaataaatatgcacaaaaaacggtctgccggatagggcagaccgtgctggagtaagtgttattatatggaggtaaaagcactgacaggttctggaatgaaaataagcctgaaccattcggtggagaaaaatgtgtggatttcttccagacagattttgcatctgattccgtgtctcttccacgtttggacacctggtgggtgcatgtccgacacaccggagacaatgggtggactttctggcagcactaactgtgctccctcatagacattattaaaccgcgcgaacagaactcgctgctatctgctattgaaattacggcagatagcagctcagacatctgcttcgcgcggttatgttttttcgggagcacaggtaagtgctgcacaaaagtcctacaaattgtctcacggagtgcggacatgacccaccgtggagtgctccaaacttggaaagacacggatcatcgcagatgcaaaaatgctggttagaaatcctgcatagcatttcggagaattgcattagcacttctctggttccggatactccacaccgaacgtttcgacagtcacttttttcatgacctgcggagcgagtgggcggtcgctatagtcggttgcagtctctgcgatcttgttgactacgtccatgccctcagtgatcttgccgaatgcagcgtatgcgccgtccagatgcggggaagtcttatgcatgatgaagaactggcttccggcggaatccggatgcatggctcttgccatggaaagaacgccctctgtgtgctttaagtcatttttgaaaccgttctgggaaaattcgcccttgatatcgtagcccgggccgcccatgccggttccgtccggacagccgccctgaatcataaagccgttgatgacgcggtggaagatcagtccgtcatagtagcctttctggatcaggctgataaaattgtttaccgtatttggtgcgatctcaggatagagctctgccttcatgatatcgccattttccatctcgatagtaacgattgggtttgacatagtatacctctttctgccctgtatgcgggcgggtgaaataagaagcagcctgctgtgacagcagtcatccgccgcctctacggcactattgtagcgaaaaagagcggattcgtaaagagaaacgatggaatttccgaaaaagtcttgccctgtaggcaggaagagggtaacattaggtagattcaggaatgctattttgaaggaaaagttgcaaatgaatatgaaaaatataatcaagaataaacaaaaggaacttatgcagggaatgattgcactgatattatgcgtggcgttattttgcagtgcggctgtctctggggaaaatgacggatctgagtggaaaatgcgccatggcgggcagaaatatgaggagacgggaactgatggtcgggggcagacaccactatatgcaggaattcttgcagaatttcgcgcgaatgagatggcaattttgtcggacaaccaggagattcttgcgaaagcagcagagcgtgcagcggaggaggcggcacatccggaacagggcgtctacacatttttacagggaccgaagtcctggacagagggacgggcatggtcgggggagtggtcgaaccagtatgtcagaggcaattacttcggcaatttcggatgcggtctgtgctgtatggcaaatatctactgcacgcttacggagtatacctgttctccgtgggatatgtatgaatatgcgaggcaggtgtccggctatgcaccatcgcggaagatcggggcaatcggctgggcggatatgaaagttacattgcgaaaaagcggttttgactgtaccctaaacacaaaaccggaaagctatgagcagttccagcaggagatcacggcgtcacagatggcggtggttctggtttccagcagggacgatgatacctactggaagaagacgggagggcattatgtgtcgatcagcctttacgatgcgtcgtcagatcaggtgttcctcggggatccggcggatccggacggcaaccgctcctggattccgctgcgctacgtgtatgacgcattaaaaaccgtcagccagtatcagtatcttctggtacaggattatgcggaggaacagaatcagtggatgcatgacgggattacggatgcatggggaggaatgtaatatatatttgacatattgtaaagcagatgctaccataaaagaagaaatcagaaactatcaggactgtgtgacaggaaatgaaacaggaggattggaagatgaaagaaaatgtggcgtatctgcttgggattgtggcaggggtggcagcggtaggaattatctgctgggtgaagaaacggggacgcagggagactgactatgatgagcggcagtatcagacgcgcgaccgtgcatgccggtacggttttctgacactgctgttttatgaattgttatacggggcattgtacagtaaggaggcgccgtcatggtgcgactatacgatgggaaattatcttggaattgcgctggcactgctggtattcggtgtgtattgcatctggaacgatgcttatatgaacctgaaccagaagccgtggagcgttcatctgctgtttggagtgctggcactgtgcaattttggaatcgcggaaaataaccagcggatcggagtcctgtttgcggacggaaaactaggatttggcgcggtgaatctggtatttgcagtgatgttcgttgtctttgaaattgtttttctcataaaaagaagccgggagaagcgggatctgtcggaggaaaaagctgaatgaaaaatctcaggttaaaagcggcgcgcgcggcaaaggatctgtcccagcaggcgctcgccgagaaggtgggagtgtcgagacagacgatcaatgccatcgagaagggagattataatcccacaatccggctgtgcattgcgatatgcagggagctggacaaaacgctggatgaaattttctgggaagaggaagaatgttaaagttagaatatattttaattggaaagctgccaaagacagagcgtgacatgctgctggagaatctgagaacagagcgggaatgtgggcggaacgttttggaatgggacagcgcgaagaaacacattcaggaagagaagcgtgtggaaggggcgcttgcaaaagagaggttagcggaaaaggtgtttgcggaaaaggcaattttagtttcgggagatgcgaaggaactaaacgaggcacagcggatcgggatggctgcgctttgctatctggtgccgggagatggaaggacgcagagaaacgaggcagccgccggggagatggaagtgacgtctccggcggatatgtatgcggaagggatggaggagatcgacggatcttttttacagcatgtctatgagagacatcatcgtattccgtggatcattttaaaaacgccgcgctgcatcgtgaaggaattttccatggaatacttagatgcactgtttgaactgtatgccgggaaaggaatgacggactacatggagccgctgtatccgtatgaggaggagcgggaatatcagcaggcgtatatcgagcagatgtaccggttctacggatacggcatgtggatcgtgtgcgacaggaacaccggagagctgatcgggcgcgccggcgtggaacaccgggaggagctgggcggagagctggagctcggttatgcgatcggtgtgccgtggcagaggcagggctatgcgacggaggtatgcaatgcgattcttacctatataaaagatgaactcatgctgccgtcggtcagctgtctgattgagacgggaaacgtggtatcggagcatctggcgcaaaaactgggctttcattattgtgaaacggtgcagatagatggaaaacagatgagaaaatacaaagttgcattttattaggaaataaaatataatattgaaataaaaattatcatggatgaagtgggtgaggcacatggcagattactctcagaaagaaaaagaacttgagcgtgagcatttggaaaaactggtaaaggaagaggaccgcagtatcaagccaatgaaggagtttgagagtccggaggatttatatcatgagttgatcgccagtgtgcgcaaatatcacccttccgcagatatttctcttattgaaaaggcgtatcatgtagcgcgggatgcgcatgagggacagacgcgcaaatccggtgagccgtatattgtgcatccgctgtgcgtggcgatcattttagcggagctggagcttgacaaggagacgatcgcggcaggtctgcttcatgatgtgcttgaggacacggtcatgacggcggatgagatcaaggaggagttcagcgaggaagtgctgcttctcgtggacggagtgacgaagctgcgccatctgcatctcgcggacaacagtcataatcacgatcagaaggaccgttctgcggagcgcttagagatgcaggcggagaacctgcgcaagatgttcctcgccatggcaaaagatatccgggttatcttaatcaagcttgcagaccggcttcacaatatgcgtacattaaagtaccagtccaaggaggcacagatccgcattgcgcgtgagacgcaggagatctactgcccgattgcacagcggctcggtatttcaaagatcaagattgaacttgacgatctctcgttaaagtatctggagccggaggcatactacgaccttgtgcgtcagattgaccagcgcaagagtgtgcgcgacgactacgtgcagtcgctcgtggaggaagtgcgcgcacatatcaaggcggcgggcatcgtggcggagattgagggacgcgcgaagcattttttcagcatttataagaagatggtgaatcaggacaaaacgctcgaccagatctacgatctgttcgccatccgcatcatcgtggattccgtcaaggactgctatgcggcgcttggtgtgattcacgagatgtacaagccgatcccgggccgttttaaggattacatcgcgatgccgaagccgaacatgtaccagtcgcttcacacgacgttaatcggaccgaccggacagccgtttgagatccagatccgtacctatgagatgcaccggacagcggaatacggtatagcggcgcactggaaatataaggaagcgagcaacaacggcggcgcggcagtgccgatgaccgtcacggaggaggagaagttaagctggctgcgccagatcttggagtggcagcgcgacatgtctgataataaggagttcatgagccttttaaagagtgatctggatcttttttcggacacggtattctgctttacaccgaccggcgatgtcaagaacctgccgaacgggtcgacgccgattgattttgcgtacagcattcactccgcggtcggcaacaaaatgatcggtgcaaaagccaacggaaagctggttccgatcgattatgtcatccagaacggtgaccggatcgagattatcacttcgcagaactcaaagggaccaagccgtgactggctgaacatcgtaaagagtacccaggcgaagaataagatcaaccagtggttccgcagtgagctgaaggaagaaaatattacgcgcggcaaggagcttctcgtggcgtcctgcaaggcgaaaggaatcaactttgcagacatcaacaagccggaataccaggagaaagtgctgagaaaatatggtttccatgactggaattcctgtctggcgaccatcggacacggcggcttaaaggaaggccagattgtcaataagatgtacgaggaatacaagcgggatcatctggcgcggatcacggacgaggaggttcttgagaccatcggttccgagaacaagaatccggagtcggcgaagcgctccaagagtggaatcattgtcaagggactttacgatgtcgctgttcatttttccaagtgttgcagtccggtgccgggagatgagatcgtgggttttgtgacgaggggacgcggcgtgtccatccacagaaccgactgtatcaatatcatcaacttgtcggatatggagaaggagcgtttgatcgatgcggaatggcagcatgacggtcaggacggcagcaacggactgtatcgcgcggagatcaagatttttggtaacaaccgtaccggacttctggtcgacatcacgagagtgttcacggagcgtgagatcgatattgatgcgatccactccaagacgagcaaacagggcgtggcgacgatcgatgtgtccttcagcacgaagggcagagaggagctgggcagcgtgattgataagctgcgccagatcgacagcgtgattgatattgtgagaacgacaggctgatgaagcagaaaaggcagacggagggaaaaagatggcgcctcttaaggtagaacagtatgtggtaggaccggtgcagacgaactgctatttcgcggtcaatgatgagacgaaagagatgattctgattgatccgggggcaaatgcggatcgtctgatacagatcatagaggaagaaaagttaaatcctgttgcaattttattgacacatggacattttgaccatgccgggggcgctgcggaagtcgcagcgcattttggtatcaaggtctatgccgaggagcatgagagagagaccctcgatgatccaaagctgaatctgagcggatggacgggagcggagacgacctatcacgcggatgtatttctgaaggatgagcaggagtttgatctcgcgggattccatatccgggtattgtttacaccgggacacacggtgggtggctgctgttattattttgcctatcaggacgcccttttttccggggatacgctgttcgcccagtcggtcggaaggacggattttccgaaggggagcgcttcggcgctgattcgcggcatcaaggagaagttactgccgcttccggatgaagtgaccgtctacaccggacataatgacaccacgacgatcggaacagagcgcagatacaatccatatctgtaagcgtatgatccgggaaaccagaggttttccggacttttgccgaagcaaagacgcatatgatataatgaatcctatcggattcatattagaagttcctgcggaacttcggatgcgcagaaagcagcgcaaaaagatgatataatatttagtttagaaaagagtcagatatgatagaagtaacattgaatcagccggaatttgagtacgatatccattcactcatcaaggcattttatccgtcggaatatgtcggagtatccgcggaaaagaaggagtatgacgagccggtgacatcccgcatgcatgtggagtacacggacgatgcgataacgctgcgctggcagcagggagagatggcgcctgcggtggagcgtacctttgcagtcgatcctttagaccgcccggagacgaagaaccggctgaaacagaatctgtatgcgcttctgtcggatgcgaccggtcagtatctgccgtggggaacgctcacgggaatccggccgaccaagattccgatgaagttgctcgaagagggaaaaagccgggacgagatctatacgtatatgaagcagacttattttgcgtcggatgagaagatctgccttgcgacagacattgcagagagggagctctccctgctttccaagatcgattatgacaacgggtacagcctgtatatcgggataccgttctgtccgacgacctgtctgtattgctcgtttacctcctatccgattgcatcgtgggcgaagcgtgtggattcctacctggatgcgctggagcgggagattgagtttgcggcggtgaagtttgcgggcagacatttaaattccatttacatcggtggtggtacaccgacgacgttagaaccttatcagctggacagactgattcggaaaattaaatgcagttttgatttatcagactgcctggaattcacggtggaagcgggaagaccggacagcattacatacgaaaagctgaaggtgttgagacagcatggaatttcgcgcatctcgatcaatccgcagaccatgaagcaggagacattaaagctgatcggcagacatcacacggtggagcagacggtggagagttttcacatggcaagagaactcgggtttgacaatatcaacatggatctgatcatgggacttccagaagagacactggacgatgtgcgccggacgatggagcaggtggcagagcttgcaccggacaatctgaccgtacattcgctggcactcaagcgggcagcgcggctgaatatgttcaaggaagattataaggattacaagatcatcaacacgcaggagcacatggatctggttgcggactgtgcggcgcagatggggctttttccatattatctgtaccggcagaaaggtatggcgggcaatctggagaacgtcggctatgcaaaagagggcatggcgggcgtgtacaatgtgctgattatggaggagaaacagaccattgtggcatgcggagcgggagcttcgacaaaacgtgtctggacagagccgaatccggatggcacgcaccggattgaacgtgccgagaatgtcaaggatgtagcgcagtatatcgcaaggattgatgagatgatacagcggaagcagaagctttttgcagaagaataaaagggttattcatcctgaaatagtacatcaaaaaagtatccaataatacggaataacctgtgagatgtattgaaacaacctaataactgtgccttaaaggacgaattcattttagcagatgagttcgtccttttctgttatagtcaattattctaggagaaaaagaacatgaataacacagcgttaggagcaaaatgagccaatgaaagaagtgtctacaataccttctttggaaagaagtaacacctgagttttcgcgatttcagagagaatttcattattgaaatttttcaggaagagtttcatgacattccagaaaatttgaaatatggggaaatatcacaaaaatcgaatgagaattttgtggcgggttacacgtttaacctttgtgaaaactatatttctattgtaatattgaagcagaatattacaaatcagtaatcaatgtgatgtagaacaaaggagaaaacacatgaataaagaaatgaccgtaaatgggaaaagctatacaataattaaattgctaggaaagggaaaaggtggatattcttatttggcagagtctggaaataacaggtatgttttgaagcagatacatcatgaaccttgtgattattatcagttcggaaacaagcttgaggcagaaatcagggattacaagaaattgaaagaaatcggaataaagatgcctgccatgcttgaagcagatgtgaaaaatgaacgcattttgaaggagtttattgacggcgacacgatttatcagttggttttagaagacaagatgaaaactgactatatcgagcaattgcatagaatgtgtgcgctgttatatgctgccaatacaaatattgattattttccaacgaattttgttgtaaataacgaagaaatatattatgttgatttcgagtgcaatgattacatggaagaatggaattttgaaaactggggtgtaaaatactggtcaaagacaccggaatttttgcagtatgtgaaagaacattcatgatactcggaagttgaaggagaaatttatgcaaaagagtataaattatatttgccagataaaaaactgttacagaaaaagctaaaagaatggctggatgaagaacagaattgattcagaggggagagtgctatctgctgggatagtattctcgggagtatcccaaaggacatttctaattacttagaaatgtccttttttgcatttgtgaatggtcattgatgctacagaatgtcagaatttacttgtttgcgctgtcagcatcaatcacagactggatctgcttcatcaaagcatcatagttgtcctggttatcgattccgccgagcataggttcgcctattatattaccatttctatcgactaaaattgttgttggaaatgccataatatcagcagcatacttaccggcggctgaatcagagtcaatggaaagattgcgataagcggcgccctggctttcaaggatttttgttgcttcttctatagcagcttcattatcatcaaaagtttcggtgttaataccaataacttcgcctcccattgatttaatagcatcatttaattcgttaagcttagataattcagcaacacaaggcttgcagccggtaaaccagaaatttatgacagttacggcatttccggaaaacaaattctgatcaacggcatttccatcaaaatcttttccagagaaattctggaaaggggctgtatcaccggaatcactttttgagtcggaagtatcggatacagcattttggctttcaatttcagtgatctgttcttcgattttacgaatggtcttaatatcatcggtaagagtttttaactcgctgtctgtaaacgaagccttgtttgcctcgacagtatcagcaagataatcagcataatttccatctggatcagcagtacttttattcatcatgccaaaaaccttgtcccatacatctttatgatctgcaaagatctggttttcctgctgatataaatcatcaagcgctgcattggagtcatcggcagatgattcactggcggatacagcagcagtattctgcgtgttctctgtttttgaagtctcctgcccggcacatccggtgattgataatgcggtacagagtgtaaaaagtgcgataatgtttctttttgttttcatgataaatcctcctttaaatgataagaattgaatagctgccggctggctattgctggttattaaaattgccgctgcatgatttttccataaattggtaatggattgcatcctttggacaggctttcatacaggcaccgcatcgtatacattccggatgatttggagtcttacggacatcgacatccattttgcatgcacctgtacacagaccgcatccgacacatttactgttttcgaccttgatgttgagaaaggatattttattaaaaagtgaataaattgcaccaaggggacaaagccatttgcaaaaaggtctgtaaaacaaaatacttaagacaataacagtaattaaaataaggcatttaaaagaaaacagcctgccaagtgcagatcgtatggcggaattcccgagggacagaggtatggcaccctccaaaacgccctgtggacatatgtatttacagaaaaacggatcccccattcctatggagttcgtcacaagcatcggcagtgctataacgaaaacgataagaatgatgtacttcaggtatctcaaaggctttagcctggccgtagaaaattttttcccggggattttatgaagcagatcctgaaaccatccaaaaggacataaaaatccacatataaatcttccaagtgtcacaccgagcagaatgaaaaagccggttatgtagtacgaaaatttaaaatttgaggatccgacgactgcctgaaaagctccaattgggcaggcgcctgcagccgcagggcaggaatagcagtttaatcctggcacacatactgttttggcatttccttgatatatttttcctttaaataaatttggaatatgaatgttggtaagcaatgtggcagctgcctgtatccacccgcgtatccgggctgttttttttgatcgtatagttgtttttttatccaattcccacacactccagacataattttattgctttgccaagcacggtagctgcttcgcctctgattgcaccataaccgatcataagagtaccggcgatgaataaagtgaactgtgatatttttttccgcatcagacagattgctcctttcgtttactgttattgtctttgttgaccagctgacattagtattatacaatagtggatgtaaaatccttgttaagaagcgggagaatattttgagattattgattgttgaagatgaaaaagaattgtgtgatacaattgcaaaaagtctgtatgatgcaggctatgaggtggatacctcttataatggaagcgaggcgcttgaatatgtcctgacggaggaatatgatctcattgtgcttgacctgaatttgccgggcatagatggaatggatattctaagggaactcaggcgggagaatgaggagacaaaggtgctgattctgtctgcgcgaagccagatagcggataaagtggaagggctggatgcaggagccaatgattacatggaaaaaccatttcatctgcaggagcttgaggcgcggatcagaagcctgacaagacgtaaatttgtacagagagatgtttgcctgaacaatggggacataaggttcgatacaaaaaagcgcgaggcatatgcaaaagaagagagggtgcctttgaccagaaaagaaagtggaattttggaatatctgcttcttaatcagggcagaccggtaagccaggaagaactgatagagcatgtatgggatgcatctgtggatagttttagcggagctatcagggtacatatgtcttctctcagaaaaaaacttaaggcagtgctgggatatgatccgattgtgaacaaggttggtgagggttataagatgcgagaggaatcagaacaatgaaaaaaatgtcacttcagtggaggcttacgatcataactacattgtttattgcagtcatatgtggatgccttaccctgtttgtatataagaacggtgtgtattatattgatttgctgcaggatactgttgatgcccagagtgatgaggacaacagtgaggaggctgatgaaatatatattaatattccagatgataaatgggatgattttgcagatgatttttccattcaggtatataacaacaaagcagattataaaaaaagaagcttgctgttctctacactgcttgcgcttcttggaggtgttgccacatattttctaagcggacatgtacttaaaccgcttagaaatttttcagataaaattgagaaagtgcaggcacaaaatctggcagattcgaggatagaagagaatgaagttaaggaattaaaccggctcagtgtttcttacaacaagatgctggaacgcctctcagaagcatttgaggtacagaggcaatttacggcaaatgccgcacatgagtttcgtacaccgttgtcgctgatgcaggtacagcttgatttatataattcgatggagcacccgggcaatgacgaatgtgcggaaaagacaattgccatgatgacggagcagaacgaaagactcagcaggatggtaaagattcttctggatatgagtgaacttcagattgtggtacgtgatgaaaaaatcatggttgatgcacttgtagaagaggtcctgacggatctggaaccacttgcaatggagaaaaatataaggcttattggaaaatgtaaggatgtaactatggtgggaagcgatatccttatttacagactggtatataatcttgttgagaatgctataaaatacaatcgtccgggcgggcaggttgttgtgacggcggagtggaaagaaaaacatgtttttctttccgtagaggatacaggaagcggaattccggaggaactcagaaaacgggtatttgaaccattctttcgtgtggataaatccagaagcagggaactggggggagtaggccttggacttgcgctggtttatgaaattgtgagagtgcatgatggcaatattgtaatcagggacaatccgtctgggggcacagtttttgaagtgattttttaacgacgggatcatatttgcgataaatgattgtatggtccttgatgcttgacgtgcaggaacacaaaacgtataataatcggaggatataaggcagaaaatggaggaacgctcatggcattaagcaagaagccggtcaacggcatgaaagatattttaccggaagagatgcagatccgggattacgtgcagcaggttatcaaggagacctaccgcagttttggattcacaccgatcgagacaccttgcatggagaacattgcaaatttgagcaataagcagggaggcgagaacgagaagctgatcttcaaagtgatgaagcgcggtgagaagttaaagatcgcggaggcaaaggaagaggcggatctggtcgattttggaatgcgttacgatctgacggtgccgttagtccgtttctatgcgaacaacgctaatgatctcccgtccccgttcaaggcactgcagatgggcagtgtgtggcgtgcagaccgcccgcagcgtggacgttaccgccagtttatgcagtgtgatattgatattatcggtgagccgagcaatctcgcggagatcgagctgatccttgcgacgacaacgacgatcggcagactcggattcaagaactttgagatccgcatcaatgagcgccgcatcttaaaggcgatggcagcgtacagcggtttcccggaggaagaatttgataccgtattcatcattctggacaagatggataagatcggtcttgacggtgtggcggaagaacttgccaaggaaggctatacgaaggagtcgattgacaagtatctggcactgtttgagggcgtatcaaaggcgcagaacggtatcaaatatctggcggacaccttacagggctttttggagccggaggtggagcagaatctccaggagattatcgatagtgtggagacggcgaagacagccgactttaagatggtatttgatccgacgcttgtgcgcggaatgagctattatacaggaacgatttttgagatcgcaatgccggagctgggagcagcgtgcggcggcggcggacgttacgacaagatggtcggcaagttcaccggaaatgacgttccggcgtgcggattctccatcggctttgagcgcatcattcttcttctgatggagagcggtttcaccgtgccgatgcagcgcccgaaggtggcatacctcattgaaaaaggctgtacctcggagcaggtatcgaaagtgatcgccagggcacaggaggagcgtgttgctgggaagcaggtgcttgtcgtgcgcatgaacaagaacaagaagttccagaaagagaagctgacagccgagggctacaaggacattgtcgagttttacaaagactgatccggaaatgatctgacagagaacgccataggatgatctatggcgttttttacataatgggaaacttcgtttctattacataaaaaagcttcgcgtggatgtgcacgtttcttaaaggagattacgaacggtataaagtaaaaaaagagaaacagcttgcagatggagggcatatgggaagaattatcggtattgatcttggaacgacaaacagtgcggcggcagtgtgggaaaatggagagagtcatctgattccgaatgcgtttggagactatctgacgcctagcgtagttagtataggcaaagatggcacggtgtacgtgggaaaaattgcaaaggagcgtctggttacacacccggaggatacggtaagcgtttttaaacgatttatgggaacggaaaagatatattcgctcgccggaaaaaaataccgtccggaggaactttccgcgcttgtgttaaaaagattaaaggaagacgcggagcattatctgggggaggagattacggaagcggtcatcagtgtaccggcatattttaacgatcttgcaagaaatgcaacaaaaaatgcgggggaactggcaggatttcatgtggagcgcatcatcaatgaaccttcggctgcatcgttatattatcagtgccgaagccaaatggaggatgccgtcatgctggtgtttgattttggagggggaacgctcgatgtgtcattagtagagtgttttgataacattgtggagattctggcggtcagcggagacaatcatctcggcggcagtgattttgaccggttgattgcagatatgttctggaagtcgtgcggactttctgaaaaccgcttctcagctgaggatgcggcaattgtgttggaacgtgcggaaaactgtaagtttgaactgaccggtcaggagactgcacagatgtgtgtgacacttgctgggagagaatatcggatggaggtctccagaaaggagctgatcctgcaggcggagccgctgtttgaacggatggcacaaccgatccggcgtgtgttgtcggacgggcagaagagtgccagagaagtagatgcggtagtgcttgttggagggtcctgtaaaatgccggtggtgcaaaagtatttgaattatctgttgcagcgcacggatattgcggttgtcagcccggattatatgattgcgctcggcgcaggagtgtatgcaggcatcaaggaacgcaatgcggatattcgcgatatgcttcttacggatatctgtccgttttctctcagcgtgtcccaatacaacgaagcagatccgaaccgtgatctctgtgatgtgctgattgagaggaacatggcgctcccggtcagcagggagactattatgacgacggcacatgacaggcagaccaaaatgaggttcaaggtataccagggggaagcaatgtacgcggaggacaatctgctgttgggaagcatcacggttccggttcctgtcggaccggaaggaaaagagaaggtgcgggtgcgttatacttacgatatcaatggaattctggtggtagatgtgcacgtcgtatcgacaggacaagaaaaacagctcgtgatccggaatgataaaatcaaattatcagaaaaggaactgaaaaaaagactggagcagttgaataaactgaagattcatccgagagatcttgaggaaaaccggctggtgcttgcgcgtgctgaaaagctgcatcgtgagacaacgggatatatccgggaacagattgacagtcgtgtacagtattttaactattatctgggaagacaggacgtcctctccatcaacaagggcagaaaacagctgaatctgtttctggactatgtggaggagcagtgtctgcaggaggcggcatttgagggaacagcagacggtttttcccggtggtatgagagtagtaagcaggcggtcgatgcgcaggatcaggtggattaccgcaaagaggaacaggaatatgaattgtggaggggcggacatctgaccagctagaagaatatgacaatatggcaaacactgggaattctccagacaacggatcaaaaagagataaaaaaagcatatgcagccagagtaaaaagctgccacagggaggaaaagccagaggagtgggcagtgcttcacgatgcttaccagcgcgccattcaatacgcgaaaagacaagagaaagaaagtgacctgaacggaagcaggacggttccaagtccggtgaaaccggtggcacgggaaggcttaaaagagcgggacgcggcgctggagaaggaaaacggacagcctgaaaccgatgagacagaagcacaatggcaggagtattttgcacgcattcgtgccggacaggagagaagcaggaaaatgctgacagaggagttgccggagcggctgcgaggtctcacattgcagggggaaggaacccagaagaaacgctgggaagagttcatgcaatcggagttggcgattaccctgtacaaagaaccagagttctggagacaaattggtgaacatgtgagggcacaggagtggtcggaggaagcatgccgctacataggcaaacgcgtggaagacataaaatatgagtttaacagtcgtgattatacggaattatggcgtgtgctggatgaacttgagaggatttgtctggaggaggcactgaaagatccgttacggagaacaaagataacgctgcgtggatttggattgacgatccttgtgttcgtgcttatcggagtgtttgtcagaattatttagaacggataaaaccgttgaaaaatcgcgtttcatggtgtaagataaaaaaagcgccggacaggctgctgcccggacagatttgaagaacatttttagattgatacaagggagttaagaaaatgacacagtcgagaacacataactgtaatgagctgcgtctttccaatgcgggagagaaagtaacgctcgtcggatggtacgagaatctccgcaaggtcagcaagaacctgggatttcttattttaagagatttctatggaacgacccagattgtcgttgagacagaagagatgatggagaagctggacggagtgaacaaggagtccaccatttccgtaacaggaaccgtcagagagcgctccaataagaatacagagcttccgaccggagagattgaagtcgtgccggaagggatcgagatccttggaaagtgtatctacaatgcacttccgtttgagattaaccagtccagagaggcggatgagaacaccagattaaaatatcgctatctggatctgagaaatccgtcggtcaagagcaagatcgtgctcagaagccgcatcgtggcagagctccgtaataagatgaacgagctgggatttttagagatcacgactccgattctgacctgctcttccccggaaggcgcgagagattatctggtaccggccagaaatcatccgggcaagttctatgcactgccgcaggcaccgcagcagttcaagcagattttaatggcgtccggattcgaccgctatttccagattgcaccgtgtttccgtgatgaggacgcaagagcagaccgttctccgggagagttctatcagcttgatatggagatggcatttgcttcccaggaggatgtgttctctgttgtcgaggaggtactgccgccggtatttgaaaagtatggtgtatacaagactgcttccaaggctccgtttgtgcgtattccatatctggagtccatggacaagtacggcaccgacaagccggatctccgcattgatctggtattgcaggatgcgacggacgtcatggcagactgcggattcggtccgttcgagggacagaccgtaaaagcggttgtcgtggacggatttactgcgaccagaaaagtgatcgacggaatctgtgccgaggtggaagtgcagacagccaacaaggcttactggttcaagctggatgagaacggcgaatttgtgggaggaatctccaagttcttacaggagcgcaaggaaaaagtgattgaggcacttggattaaagccgggtgattttatcggtctgaccgccggcaagaagctggcagcgcagaagaccgcaggcgtactccgcagactgcttggcgctgcgagcgagaagcacatgaaaaaggattgctacgaattctgctggatcgtagatttcccgatgtatgagatcggcgaggagtccggagaactggagttctgtcacaacccgttttccatgccgcagggcggtatgaacgcactctgcaacgaggagccgctttccatccttgcttaccagtacgatctggtgtgcaacggcgtagagctttcctccggtgcggttcgtaaccatgacccggagatcatgatcaaggcatttgaactggttggtctcggcgaggaggatgtgaaggcaaaattccctgccatgtacaatgcattctgctacggagcaccgccacacgcaggaatcgctccgggtgttgaccgtatgattatgctgatctgcggcgaggagagcattcgtgagatcatcccgttcccgatgaacaagaacgcgatggatatcatgatgggagcaccggcgactgtagatcagaagcagctggacgacgttcatatccgcattcagatgccggaagaaaaatagcgtaaagcgacagcaataaagacacaggcttttggacagactatctccaaaagcctgttttactctatataaagtagaaaacttgaatgaaaaaggagatcacagagagaatatgggaaaaagaaccggaaagaaccgtaaaacgggcggcagggcaggatatggaaagcgtgcggctgcggcgggaatgatgttcgtgatgttgttttcttttgccgcctgcgggaagacgaccgcttctgaggaagcggaggcactgagcggaagctgtattgacattttaaacaaagtttacgaaacggccgatctggatgaatccatgcgggatgccatgcaggattatgagatgacgacgatcgacgcggatatggaagagtatgtgctgggcacagatgagatcacgtataccgactcggcatattctgcgccgatgatgacgtcggtggcatatcagtgtgttgtgctgcgcgtgccggacggaaccgatgtgccgaaggcaaaacagacgcttttggacaatgccaatcctgcaaaatggatctgcgtggaagcggagagcgttgcggtggagagcatcggagatgtgattttatatgtcatgggcttcgacgaggacgtgtctgcaataaaagatgcatttcttgcattggacgaatgagatggatgcaattaagaaacaataagcttttgatgtgagaaatatcagaattgactgataacaccataaagagataaaaaggaacgatgagagaggaaatcctggttcgcggacagagaatgacagttctgtcttaagaccgggattttttatataaaagcaaccattgttttgtaataaacagtatataacagttgacaacagttctatactgttatatactgtttgtcgaaggaaaacctacatactgcgcagaggtggaggagaatacaaaaaaatgaagataattgtggatcacacatcgatgcagccgatctatgagcagatcgtagagcagataaaaaaacagatcctgcagggaaccctgcgggagggagcgccacttgacagtgtgagaatgcttgcaaaagatcttaaggtgagcgctctcaccgtaaaaaaggcatatgatgcccttgaggaggagcagctgatcgcaacggtgcatggcaagggcagctttgtgctcggggtgaatccgtcactgcttgcggaagaacagaaaagagagatcgagcagcggatggaacagctggtggcgaaggcgcgggcgtatggcatgagcgacgaagaactgcgggcggttctggaattgtttttggaagcataggagtgcaatcacaggaatggagaatcatatgaatgatgggatggtgcaactgaacaaagtaacaaaggcatacgggtcgtttcaactggactgctccatggaagtgcagcccgggatggcaaccggatttgtcggggcgaacggagcgggaaaaacgacgacatttcagattctgctggggctggtgccgccggagacgggtgagataaggatcttcggaataccatatacagaactgactgcaaaagaccgggagcggatcggggtatcccttgcggattcgggcttcagccagttccttaccgtccgggatgttaccgccattctgcggaatctgtataccagatttgatgaggccaggttcttggaaaaatgtcagcggtatgaacttccggcgaacaaaaaaatcaaagatttttctaccgggatgcaggcaaagctgaaattgctgattgcgatgtcacatgacgccgacctgctgattctggacgaaccgacgctgggactcgatgtgatgtccagagaggcgatgcttgaagaactgcaggaatatctggattcggagggaaccggcggagcaccgagatctgtcctgatatcctcccacatctccagcgatctggaaaagttctgcgatgatatctatatgattgaccggggtaggattgtgcttcacggggagacggatgttcttctggattcatatggtatcttaaaagtggatgagcggcagtatcaggcgctggaccgtagatatctgcttgccggaatgcgggaagcgtacggttatcgcctgctgacgaacgagcgccggtattatcaggaaaattacccggatcttgtgatggaaaaaggcagcattgatgatattctgattttgacagcgaggggggagaagctatgaaaggattattgacgaaggattttcggattctggcagggcagaagcggtattttacgattatcattctgattgcgctcatttttctttgcagcggtcagccagcgcagatcattgtgggatattgtaccatgttcggcatgctttttacagtaaacacgatctcgtatgacgaatttgatcacggctatctgtttctgttcacgcttccggtgaccagaaaagattatgtgctggaaaaatatgtatttatgatgctttgcggcggtggtttctgggcagtttccgcagcggccggttttgtggcagattatatccggggagatgtggtgtctcttttagaatggctgatgcccatgttccttattttattagagatgataatttttctggcagtcatgcttccggtcagcctgaaatacggtatggaaaaaagcaggacagcaaccatgattctggggtttgcggtgcttggggctgcaattgcagcaaggaagcttctgccggagaattttgcgggagggctgaggtggtctgcgcagttaaatcctgcggccgtgactgcggtagtgtttctggttttcctggccacattggcggtatcctttgcgggcagtgtccgcattatgcaaaaaaaggtattctaaggattgccactttacaaatagtgcaaaaaataggataatggtatcacttaaaaacaacattttacaatagatgggattgatcatttatggaaatagaacatatcggtgataacaaaatccgctgtgcactgacggaacaggagatcgagagtctcggatacgatattgatgagatcattgcgaacagcgagatcacgcaggaattcatgcataccgtcttagaactcgtcgaggaacaggaacatattcagatggagggcatctctccgatggtgaaggcggagcttttgcaggatcatagtatggcgatcacttttggcgcagacaaagaggtgtcactgagggatctggtgaatacggtcagtcatatgatcagccagctggatccggacgctgcatcagggaaaacggccaaggcagaggaggggaacgcacaggccgcagcagatacggcggatacggcagccgctgcgggaacgcataagcgcaccgacccgatgatctgtgcactgcgcttttcttcctttgagaatatgcgcaggatgagcctgcttgcttttcgcgggaagattccaaagagcagtctctacaagatggacggcgcgtactatctgattctggattttacgggatttgccaaggaggagatgcgtccatttgcgttcggaacgatcgagtatgacgatgcgcattactccgatcaggggcacattgcacatatcagagagcagggaatttgtatcatgaaaaagcaggctcttgaaatgctgatgcagttgtgagaaatagataaaagccgttttgtaaataggcaaagtcctcaaatccggtcacaaaatttggtaaaaatgccgaacaacttcctgatgcattttccactatatatgctatgatggtagaggtgtgtgtacaagatatatacaccaagaagagaatagcacagaagaaggcgggggacgccggtgtgcggaaagtggagaagttatgagcagagagcagatctgggagcttgaggagaacaaacgcagcctgttaagacaggcctatcggatgaagcaggaatgtccgcatatgtcgccggttggacttgagtatgaaatgtatgccgcgattatgaaagaagtgcgggagattacggcgagattacagctgtctgcagaggcttaggatggcgttacaaaagaaaatcaatataagaataaaaaagagctttcatccgggtttgcagatgaaagcttttttgatatgataaggagaggatgcggaatgaagagacagaagatgcggacggaacagaagtctaatgtgaaaaacagtgtgggaagacttgtgtttgtaggattatccctgcttttgcaggttttgtggattttgctgctgtttttgcggttgaatgcatattctacggcaatcagtttatgctttagtgtaggagcatttcttgtggcgttaagcatttacgccaagcacgagaacgctgcgtttaaaatgccctggattattctgattctggcgtttccggtgctggggctctgcatatatctggtgtttggacacaagaatgtggtcgcaaaggcgatgcgcagacgctttgagacgattgaaccggtgctgtttgagcagattccccaggatgaggcagtgcttgggcggctggaggagcaggattttgcggtggcgaaccagtgccgctatatcaagcggtttgggcattatccggtgtaccggaataccgatgtgacattttacccggatgcggcggagggacttgcggcgcagctacacgatctcgcgtcggcagaacattttatctttatggaatatcacgcgatcgaggaagcggaggcgttcggcaggattaaggacgtgctcgccgagcgcgcggcacacggggtggaggtacgcctgttttacgatgacgtcggcagtatcggctttatcgatccgggctttatcaagcgcatggaagccatcggtgtagagtgccgggtattcaatccggtacttccgattctaaacattttcatgaacaaccgcgatcacagaaagattacggtggtggacggaaagatcggctacacgggcggctacaatcttgcggatgaatattttaatatcacgcacccgtacggagtctggaaggataccggaatccgtcttgcgggagatgcggtggcaagcctgactgtgacatttcttcagatgtggaatgccacggcggaggcggaccatgagtttcagacgtattttccgaagctggattaccgcgcggcagacaccggttttgtacagccgtatgcggacggccccctgacggacggctattttgcggaggatgtttatttgaatctcatcaagagtgcgaaacactttttctatgcggcgacgccgtatctgattatcagcgatgatatgacgagggaactgtgtctggctgccgagcgcggcgttgatgtgcggattgtgacaccgggaatcccggataagaagttagtgtatcagacgacacgctcctactatgcgcctctggtgcggcgcggcgtgcgtatctatgagtacacgccgggatttatccatcagaagcagacactttgtgatggggagacggcgacggtcggaacgatcaattttgactatagaagcctgtaccatcattttgagaacggcgtgctgttgcatggctgcggggcgatcggtgccattggagaggactttgcgcagatatttgaggtgtcgcgcgaggtgacggaacagtataagggaaagcggagtatggggcttcgcatcatacagtgtattctgcggttgtttgcaccgctgttataggagaagaaaaatgcgacgcattgcgtctgcggaacggaggtttttatgctgagagagtggaaagagccggtaagacccggggaagaggaattaaagatgcgccttgtggcagccagggaaaagcttgccgcccagcagcttctcatcaaggagcagaaagtgccggtactggtgctgctggaaggctggggaacggcgggaaaaggctactgcatcggtcagatcatcgagaatattgacccgcgccattttaaggtggagtccatggagagaaagaccggggaggaagagcgcaagccgtttttataccgccattttacccggattccggaggcgggaaagtttgtgttcttagattccggctggatggatgaggtggtggaagagcgccttcacggggagctttccgaggaaaaatatgcaaagcgcatcgagagcgtgcggcgttttgaacgtcagctgacggataacggctacctcgtgatgaagtttttcctgcatatctccaagaaagagcagaccagacggatggagcgcctcacggatgaaaaggacaccgtctggcgtgtgggaaaaaaggatctgtggcagaacagtcactacgagaagtgcatggatgcgttttcttcctatttgaagagcacgaatatgccgtccgcaccgtggtatattgtggatgcaaagtcgaagaagtggacggaattgcaggtgcttgagacgctgacgcagggaattgacattgcgcttgacaaccgtgatatggcggttccgcttctgcagaatgtattcccgttagagcgcatgccgcttctctcggagataccgctcgataagacgctcgatgaggagacgtaccgcaaggagttaaagcatttaaaacagcggcttggcgagctgcacaaccgcctgtaccgcaagaaggttccggtcatcatcgcctatgagggatgggatgctgccggaaagggaggcaacatcaagcggatcaccagtgcgctcgatccgagggggtatgaagtgcatccgattgcaagcccggagccgcatgagaaggcaaggcattatctgtggcgcttctggacgagactgccaaagaccggtcacatcgcaatttttgaccgttcgtggtacggacgtgtgatggtcgagcggctggagggattctgcacggaaaacgactggatgcgcgcgtacaacgagatcaatgaatttgagaaggagctgcatgactggggagccgtcatcatcaagttctgggtgcagatcgacaaggatacgcagctggagcgctttaatgagcggcagaacacgccggaaaagcagtggaagatcacggaggaggactggaggaaccgggaaaaatgggatcagtatgagacggcagtcaatgagatgatcacaaagacgagcacgacctatgcgccgtggcatatcctcgagtctgtggataagaagtacgccaggatcaaggcactccggatcgtgattgaggagctggagaaggcactcgattaggttctgttttagaatgacagaaatatgcaaattatgccatgcgtggcaatacaatttcgccctctgtcttactataatattttcagaaggaatgaaaataggaaggtaagacagggggattttttatgcagtacggacattttgacaatgagaaaagggaatatgtcattgactgcgtcgacctgccggtatcgtggacaaattatctcggcgtgaaggatttgtgcgtcgtggtcaatcatacggcgggcggttacatgttctatcagtctccggagtatcaccgggtgacgcgttttcgcggaaatgcggtgccgatggaccgaccgggacattatgtgtatctgagggatgcaaaggacggagactactggagcatttcctggcagccggtgggcaaaccgctggatcaggcaaaatacacctgcagacacggcatgagctacacaacctatgagtgcgattacaagggaatcaaggcgagccagacactcatggttccgatggacgatgcggtggagctgtgggatgtgcgccttaagaacaccacggacaaagagagaaggatatcggtattttcgtactgtgagttctcgttccatcacattatgattgacaaccagaatttccagatgagcctctactgtgcaggatcatcctacgatgagaatatcatcgagtatgatctgttctatgaggaattcggctatcagtatttcacgtcgaatgtgacgccggacggatttgactgtctgcgtgacagctttctgggagcataccggacggaagacaacccgattgcggtggagcgcggaacatgcagcggttcccatgaacttgggaacaaccactgcggaagcttacagaaggatcttgtgctggcaccgggagaggaagtacggttgatctttatgctcggagagggcaaccgcgaagcgggaaaaaagattcgggaaaaatattccgacatggcaaatgtggatgcggcgtatgcacagttaaaggactactgggaaaataaatttgcacagctgcagatcaagacgccgaatgagggaatgaatacgctcatcaatacctggaacctctatcaggcggaagtaaatatcatgttttcgcgttttgcatcgtttatcgaggtaggtggccgcacgggtctggggtaccgggatacggcacaggatgcaatgacgataccgcactccaatccggagaaatgcagacagcgtatcgtggaactgctgcgcggactcacgaccaaaggctacggactgcatctgttctcgccggaatggtttgacccggatgcaaaaaaggaaaagaaaaagccgtttaagtctccgacggttatcccgacagtgaacgcgaacgacattgtgcacgggctggaggatgcctgctcggatgatgcgctctggctggtgccgtccattatcgaatatatcaaggagacgggagagactggatttgcagatgagaccgtgacctatgccgacggaggcgagggaacggtatatgaacatatgaagcggattttggatttttccgcggaacaggtcggcgcaaccggaatctgcaagggactccgtgcagactggaacgactgcctgaacttaggcggcggagagagcgcgatggtgtccttcctgcattactgggcgatctgccacttcctgcagctggcagaatatctcggacgcacggaggatgtggaaaaatatcaggcgatgcgcgagcgggtaggaaatgtctgtaacagggaactgtgggataaggaatggttcatccgcggtatcacaaagaacggaaagaagatcggaacatcggaggatgcggaaggaaaggtacatctggagtccaatgcatgggcagtgctttccggtgcagccgatgtggaaaaaggaaaacgtgcgatggattccgtggataagtatctgtttacgccgtatggaattctgctcaatgctccatcgtacaccgtgccggatgacgatatcggatttgtgacgcgcgtttatccgggattgaaggagaacggctccattttctcccatccgaatccgtgggcatgggctgcggagtgcgtgctgggacgcggcgaccgtgcaatgaagttctacaacgcactgtgcccgtattatcagaacaatatgattgagatccggcagtcagaaccgtattcgtactgccagtttgtggtcggaagagaccacacagcattcggacgggcgcgtcatccgtttatgaccggaagcggcggctgggcttatttttccgcaaccagatatatgcttggcatccggccggattttgaacacctgaccattgatccgtgtatcccggcagactggaaggaattttccgccgtcagacgctggcgcggggcagagtataagatacacgtggaaaacccggacggcgtgatgaagggcgtgcaggaattgtatctggacggagagaaggtcgaacgtatcccagtgatggcacagggaagcagacatgacgtcagagttgtgatgggatagcacaggaaaagaaaggggacattgatatgatcaaatttggaaccggcggctggagagccgtgattggagacgattttacaaaggcaaatatacagcttctggcgcaggggctggtcaacaaaatgaagagcgagggtgtgaccgaacagggcatcgttatgggatatgaccgcagatttctctccaaagaagccatgcagtgggcggcagaggtatttgcagcggcacagatcaaggcatacctgatcaacaaatcatcgccgacaccgcttgtcatgttctacgtgatgaagcatgattttccgtacggaatgatgattaccgcaagccataacccggcaatctataacggaatcaaggtgtttactgcgggcggccgtgatgccgacgagatccagacgaaggatctggaggactacattgccgacatcgcatcggacggcgtctgcgcggttgcatatgaggatggaaaagcggcgggctatatcgaggagatctatccgctcaatgagtacatagacaatatcattgcatcggtggatatgaaagctatccgcgacgctgatcttaaggtggcactggatccgatgtacggcgtgagtgagacatcgttaaagacgattcttttaactgcccgctgcgaggtgacgacaattcatgacagacatgatacactgttcggcggaaaacttccggcgccttccgctgcaacgctccactcactgcagaattatgtggtggaaaaacagtgtgacatcggtatcgctacagacggagatgcggaccgtatcggcgtgatcgacgacaagggcaatttcctgcatccgaacgatattctggtgctgctgtattactatcttgtaaagtttaagggctggcatggacctgtggtgcgcaatatagcgaccacccatatgctggataaagtggcagagcagttcggagaaaaatgctatgaagtgccggttggttttaagtatgtctccgctaagatgcaggagacaggagccatcatcggaggcgagtcttccggcggtctgaccgtacacgggcacatcaacggaaaagacggcatctatgcggcggcgcttctgatcgagatgctggcagtgaccgggaaaaagctttcgcagatcatggatgatattcacgcagaatgtggggagatccatatggaagagcgtgattataagttcacactggagaaaaagcttaagatgcaggaagttttaatggagcagaagcagctgccggatttgccggaagagattgaccatgtctcctatctggatggcagcaaggtctacttcaaaaatggaggctgggtcatcgcccgcttctcaggcacggagccgctgctgcgcattttctgcgagatgccggatgccgtcgaggcggcggacatctgcaccagatacgagcagttccttgatctgtagagcacaaaaacgccacacggagcggaccggataatttctattcctgccgcgttttccgttagcgatgatcactgtcttttgaagctttgagcactccgccggagatgtccgcaagctgcagacaattttaggactttcgtgtgcctcttatcgaattgatgaacaaaacataaccgcgcgaagccgatgtttgaattgccatctgccatgttttcaatagcagatggcaacgagtttcggttcgcgcggttttatattgtctgtgaagcaattcgattagaggcgctagaaagtccgctcattgtctgcgcttgtcggatattcccggcggagtgtcaaaacgtggcaaagacagggtatatgctgtctagtccgcgcggcggtgttctgctataatggagagagaaaacggggaggcagccgtgtgaaaatacattttttcgcatgcaggaatggagatttttatggagaaaaagagacgactgtcgtcattgaagaagaaaattatagtatttgtcatcctgtgctggggtgtcccgatcgcggtattttttgcatataccaccagctcctaccggaagggaatcattgagaagacggaaggtctgatggaggatcagttagagaatatggcttcctttgcatcgatccgcatcgaggatgccatcacgctctgccagagaccttcctatgagaagacctgggagaatgcctggaaaaaatacctccggggagactattccagaaacgactatcttcaggatgtctataccagtctgcgcggaaagttctatctggacgagcgttttaatatgtatgcctactactgttacggaaccgaagatccggagagcttttcttcgcgcaccggcatctcgttaaagagttatgtggatgagatacagccttacctcaaagatgtgatagattcggattcggcgtatgcctgcgtgcgggtggtcgacgggcgtatttttatcgtccgcaatctgtacacgacgatggattatacacggtacggcacgctggtggtggagttaaaccgcagtaaggtgttccaggatgtggataccggtcttttgaatgatatggtggtctgcttcggaagccgcgatgcgcgggttgactttgtgaaaaacgaggagaagagtgacaaggaacagcttttagagcagcttctgcaaaagtatgacggggtgagcaaccacacattctcaaaggcggaggacgctacctaccgcgcgtatctgtatcaggagcggcgggatgattttcacatcggcattgtactttttgccagaaagagcgaactctattccgggctgtaccagttctatacgattgttgcgctgatgtttttgctgttgattccgctgtttggctatgtggtgtattttatccgcaggaatatccagcacccgatcgactggatgctccgcgcttccggacggatggaagcgggagagatgggaatcacggtcgagggagacatgcccaatcaggaatttatgcagatgaaggagagcttcgacagcatgtccgcgcaggtgaagtatctgtttgattccatgtacagtgaaaagcttgcgcgcaaggatgcacagattcaggcgcttcaggcgcagatcaatccgcatttcctgaacaatacgttagagatgatgaactggcaggcacggatgtcgggagatacggtcgtgtctaaaatgattgaatcgctgggaaccgtgcttgattaccggatgaaccgcgccaatgtaaaggagattcaccttgcggaggaactgcagtgcattgatgcctatttttacattatgtccatgcggttcgggcagagactctcgatcgagcgcaagattgacgatgatctgctctatctgatggtgccgccgctgatcttacagccgattgtggaaaatgcgattgtgcatggggtagagacggtaaaaaacggcgtcatccggcttcacgtataccacgatgatgaaaatgtctacttaaaagtgcgcaatacgggcaaaaagatgacggaggaggagctggagcggatccatgctatattggagggcgatgagagcaagcttccgaagaataccggacgccacacctccattgggattcagaacgtgaaccgcagaatccgcctggtatatggggacgaatacggtctgtcgatcgagcaggaggaagactgcatcacggtttcgacgattacgataccgtacgttgaccatgaggatgaaatatcgttaaaagagagaagcgaagcgcaaaatgagttaaagaacatagcaagattgaacaaataatgtcaaataggtctaatgccttttgtgagttctgctcgtataatatcagtatagcaaatgaaaaacatttgcaggaacaaaaacaaggagggttttgactatgaagaaaaaggtattatccatgatgctggctggcgcaatgacagtgtccatgctggcaggatgcggggcgggctccgatgaggctgcaacgacagacaacacggcagccgacacaaagacagagacagccggaacaacagaagcaggcgggggtactgcagaagcatccggaaatccggtgacattaagaactgtgtcgatgttcggaggaaccgatccgaataaggagacctacgaagcaatcaacaaagagtttatggagcagtatgactacataacgatcgaagacaattcacagacatccgatgaggaatggaaagcagcagtcaatgcggacttctccgtaggcaatgagccggatgtcatccagttcttcacggatgcaaccgcagacagcatcattgcaacggataagctggtatcgattgaagacatccgcgcagaatatccggactatgcggcagacacactggattccgcattacaggcagcggcaaacaccgacggtgttgagcgtgcggttccgacaaccggatactgggaaggcttatactgcaacaaggatctgttcgaccagtacgatctggaacttccgacagactgggcttccatggagacagcgattgagacgttcaaggagaacgacatcattccgattgcctgctcgttaaacaacgtaccgcattactggattgagttcctgatgttatatgcatccggcgtggatgagtatacttccattccgacgagcgcaccggaaggatgggtaaaggggcttgagatgtttaagacattaagagatatgggtgcattcccggaggatactgacaccgttgatgacgcatacacaggccagctattccgcgacaagaaagctgccatgcagttagacggttcctggtatgcaggaaacatcgaggataccgacaacaccgttgtgatcgcattcccgggtgttccggatcagaaagcagaggcgggctctttggtaggcggtatctcttccggattctatatcacaaagaaggcatgggaagatccggacaagagagatgcagcagtgaaattcgtcatggcacacacctgccaggcaggcgttcagagatactgggaagcaaccggcgctgtgtcccaggcagctgttgaggtaacaccggtagagggtgcaacaccgtttgcacagtctatcgcagagtacacaagcaacgcaacggcgatcgtggcaccgacagattccagaatcggcgatgcatacaagacacttgtagtagagaatgtcaaggtatctacaggtgctatgtcggcggaagatgccatcaacgaggcactcacattggtgcagcagtaaaatcagatacagaaaacagtatgacggaggggctatgcccagcggccccttcgttttttgtacccaaaaaacagttatttttatgatagaaaggtggaagaaagatgttatataagaaaaaatggccgcttgtggtgtttttggtaccgggtttattgttcatgttagtctttctttacataccgttcgtgcagaatattaagaacagcttttatgatatgacggcaatcatcgagatgccgggaactgaatggaagtttattggatttgaaaattacaagaaattgtttacagacccggatgtgaggacggcgctcgtcaattccctgaagatgatggtgctcacggtgatttttgaggtcggaatcgcatttgtgcttgcggtaatggtttcacagataaaaaagcttcagcagttattccgtacggtgtacttttttccggtagtgatttctgcaacggcgattggtctgttgttcaaattattctacaactataacggtggtatgctgaatcagattttagagagcattggagcaaagccggtcaactggctttcccccagcctggcatttatcatggtctgtatcccgacgctgtggagttacatcggtttttactttgttattctactcacggggttaagcgatattcctgacgacatatatgaagcggcgtccatcgacggatgcagccgctttaaacaggtattttatattacactgccaatgatgaaaccggtattctttacatcggtcacactggcggtaacgggagcattaaaagtatttgatcttccgtgggtcatggtgccaaacggcgcgccgcagggactgacccatttccttggaacgtatatgtaccagcagaccttcggactgaacaattatgattatggttctacactggcggtactgatcgtggtgctcggcattgtggtgtcgaaggcagtcggctttcttacggcagatgcggacgacaaagaagcgaaaaagcgcgcaagagcagagaaaaagaagggggtggcttaaatggatgcagcagtaagtgtaacgacagtcagaaaaaaacacaggagaatcggagccggtacggttgtcatttatctcgtactgatcttctgggcggtgctcaccattttcccgtttgtgtgggtggtgctgaattcctttaaaccgtccgcggaggtgctccgctcctccttctcacttccggagacgttcacctggatgaattatcagacggcatttgagcggttaaacgtcttaagagcctataggtacagcttcgtgatctccggcacggtaacggtaggcgttatggtattcgcgtcgctgatggcattcggacttaccagatatcatttcaaaggcaaggagctgatccgcagcctcatcgtggcaagtctgatgtttccggtattttccacgatcattccggtgtttaagatgatggtggaatgggggcttctgaacaaaagcattgcggttatcctgccgcagattgccggaaacttaagctttgcgacgatcgttatgaccggtttcatgcagagcattccgctggagatggaggaagccgcctacatggaaggcgcagatgtatttaaggtattcggaaaaattattgttccgctttgcagaccgtcacttgcaacggttgccatctttagtttcctctggtcttataacgacctgtttgtacagaaaatcatgatgcgtgatccgaccaggtatccgatctccacattgttagagcagatcagttcccagtatggaaccgacttcgggctgatggcggcgtctgttacgatcattgtcatcccggtcatgattgtgtatgtactgttacagaaaaatattattaaaggattgacagcaggtgccgtgaaaggctagacttcttggaaagagagcggaatttgctcaaggggaggattagctatgtataaggtgatgattgtggatgacgaaccgatcatcgtggaagggttatcgaggagcatcgcgtgggaaaagtggaattgtaaggtcgcggcaacggcgcacgacggactggaagggaaaaagattatcgaggagattcacccggatattgtgtttatggatatctgcatgccggagatggacggactggcgatgatcgctgcgatccactcgcagttcccggatctcgaggtctgtgttctgacgggctaccgtgatttcgagtacgcgaaggaggcaatccgtctcggggtgacgcgctttctgctcaagccgtccaacatggacgaactggaagaagccatcggcaagatgtgcgggaacttaaaacggaaaggaattaccggggatgagccgaagcgtgatccgcaggatgaagaagcggcggaagcgcacaaggagagcgcatcaagcagctttatcgtgaagaatgcactgacttacattgaagagaattatacgaagaagctgacgctctgcgaggtggcagagaagacgtatgtgagtcagtggcacttaagcaagcttttaaaccgctacacggggcagagcttttcggatattttaaatcacgtccgtatcgagcatgcgaaagaactgctaaaagatccgtcgctgcgcatcggagatatctccgagcaggtgggatttttagatctggcacatttctcaagggtatttaagaagcaggagggagtctctgccaatgaataccggaatcaggtactgggaaagtaaggtgccggacggctagagtacatagtatccgagcacgccgcacagaatccctgcaagagcgcctgcgatgacgtcgcgcggctcatgaacgccgccgatcacgcgcaggacggcaaggacaacccctaagagtccgagcagaatgccggcggaagggtggacatagaaaatggtggcggcaatgataaatacggaaaagacatgacggctgggaaaagatttcccggctgtatctttttctatggcaggcggaaggccgaacttctcataaggtcttggggcgttaaagatccggcggaagagcgtgactgcggcaaaggagatggcggggacgagaagcgcccgcaggaaaaaagtgctgccctcaagaaaaagcagcagcagaaatgccgggtacagcacgaaaataaagccggtcaaggtgtggttgagcaggcataccagccggatgcgccgcggatgtccccgtaagatgccggtgattttctcataggattctctggtcatgagacctccgatccggcaacggcgagcagtgccccgatgaaaatgcagaagtcagagatgttgaagacgatcgcgcgcagccatttcggaccgaaattcagatgaaaatagtcgacgacatgccccttcgtatagcggtcgtaaaggttgtttaaaccgccgccgagcaggagcgcaacgcccgttttttccagcgcgtgtccgctaaggcgcatcagaaaataggaaaaaaccccgacaacaacaagaatgacggtgtggatgatgcgcagaagatttggcctttttaccatgaaattcaaagccgcgcctttgttataatatttttccaggacaatcctgcccccaagccgcggatggcgcaccttgcgggcatattttttgtccatgtaacgcttcaagatgagatccgacaggaataccccaccggcaataatcgcataaaccatgtaaaaatctcctgatcggtgttgatgtatgtatcatatcatcttccatgggaaatgaaaagtgatttgcgcttgcctttttttatccctgtttgtgcagttgcccgcaaacccttgaaagggcgtcgattggctgataaagtcaagacagaggcagaaaaatctgcagtaaataacgggcgggagacgggaaggcgtctcctgcctcatgagagaaaggaaaaagggattacgatgaacattatcagagcaaaagactatcaggacatgagcagaaaggcggcaaatatcatttcggcgcagattattatgaaaccggactgtgtactcggtcttgccacgggatcgacgccggtgggaacataccaccagctgatcgagtggtatgagaagggggatcttgacttttccagagtgtcaacggtcaatctggacgaataccgcggcctggcacacacggacccgcagagttactactattttatgcaggagaacctgtttgaccatgtgaatatcgataagacggcaacgcatgtcccggatggcacaaacccggacgcggcagatgcctgcgtgaagcatgagcagatcataaagtcgctcggcggaatcgatttacagcttttggggctggggaataacggacatatcggatttaatgagccgggtgcagcgttcgagaaggagacacatctggtggatctggcagagagtaccattcgggctaatgcacgtttttttacctctattgacgaagtgccaaagcaggcatatactatgggaataagaacgatcatgcaggcaaaaaagattctggtggttgtctcgggagagggcaaagcagacatcgtctcacgcgcgttcttcggaccggtgacgccggaagtgccggcatccatcctgcagatgcatccggatgtgacggttgtctgcgatgaggcagcactttccctgtcaccattatagaggtacaaaagtcagaggaaaatgggggatttaagatgagaattaagaatgcacttgtatacacggtagagcatggatttgaggagcgggatgtccggataaaaaacggctgttttgcggggagtgaagcggccggcacggacggggaagagatcctggacgcagggggagattacctgataccggggcttgtggacattcattttcacggatgtgcaggtcatgatttctcggacggaacaccggaggcattgcaggcgatcggcgcgtatgagcttcgccagggcgtgacaagcatctgccctgcatcgatgacactctcggaggagacgcttaagacggtgtgtgccaatgcgtatgcgtatacaaagagaccggaggcagagcaggataccggggcgagactgatcgggattcatctggaaggaccgtttatttccatggagaaaaagggtgcgcagaatccggcttatatccggaatccggatgtagagatgttcctgcggctgcaggaggcagcacacgggctggtgcgtctgattacgattgcaccggagacggacggtgccaaggagttcatccgccggctggcggatcaggtacatatctcggtcggacatacctgcagtgattacgagactgcataccgcgcattttcacagggggcggatcatgtgacgcattttttcaatgcgatgccgccgttcacccatcgcgcgccgggcgtgtttggcgcggcgtttgacgcgaagcatgtcatgccggagctgatctgcgacgggattcatattgatgcttcggctgtccgcgtggtattctccctgttcggggcggagcgcatgatcctaatcagcgacagcatgatggcgaccggtatggaggacggagcgtattccctcggcggacttccggttaccgtgcgcggcaatcttgcaaccttagaggacggaacgattgccggctcggcgacgaatctcatggactgcatgcgaaaggctgtctccatgggaatcccgttagagacagccgtgcgcgctgcaacctataatccggcgagagcgatcggtgcggcggatgtgtgcggaagcattaccgcaggccaccgcggcgactgtgtccttctctccaaggatgacctgtccacgaagaaggtcatcttcggaggaaaggtggtcgcctagcgctcgatccagtcacggacatccgggatcttagagagcaccggaagcagtatcagactaagaataatgccgacaacaccctgtacgatgttaaacgggataccggtcgcagaggaagcaatgccggcggcgatagatgcctggtttaaggctccgctgccgagtgcggcaagtccggtttcgtagagaaaatagccgatgaccatgatggcttctccgacgatgccgccgattgcgagcgctgcgtagcgtccctttttcgagtgcagggtgtttttaaaacgatggaagagcagtccggcaatgccgcccgtgagcgccttgataatgaaagttgcaggagcccaggtcacgtagccggagaaaatgtctgagaacatcgagccgatgccggcagcgagcgctccgggaagtgggccaagcacgacgccacacagcagaacgaagccgtctcccggatggatgtaaccgaaggttggtgtcgggatcttgatgatcatggtcgccacgcatgtcatggcggcgagaagggcagcagttaccagttttttaatattttgatttgtcattaggaagtctccattctgtcagattcatataaaagtttgtatttcaacgttgatgcataagagtataacacaagatggattgataaaaatgtccagttgcgattaaattgaccatgccagtttgccggaatggtcttttttcttgcctgaaacacaaagcactgatacactagagacgatgagagagaagaataagggaggaattttatgaataaaaagtgcagaatcctattgtatgtgctgtcgattgtcatggtggcaggatgtattactgccgtggcgcggacgaaagggagcacgccggaagtaaaggtgccgggcgaagagccggcagctgtggtatcgggtgaggacacggagcatgcgggggcggatagcggagcggatcgtgcgcctgccagggaggagaatgagaccgcggtggagaccacggaggcggaggagagaacggaagccgcggaagtggccgaagaagcggaagcgggcggtcaggcggaagcggatggcagtacgacgattctttttaccggggatgtcctgtttgcaaatgcgtttaaggcgggttatgatgcggacggaatcaagggcgtggttgcaccggaactgctggaggagcttcgggcagcggatattctgatggtgaataatgaattcccgttctcggatcgcggcacgccgatggcggacaaacagtttacattccggtgcagtccgggctatgtaaaggcattaaatgagatgggcgtggatgtggtatcactcgccaacaaccacacacttgattatggaagggaagcgctctcggatacgtttgcagcgttagacggtgccggaattctatatggcggcgcgggcgattccgcggagcgggcaaagcaggtgcaggtaatcgaagtccacgggaaaaaatacggatttatcgcggtatcccgggttgtcccgacggcggactggaaggtggaaaatgcagtgccgggactgtttagctgctatgacaccacggctcttgtggaggtaattaaggaagcgagggagacctgcgactatgtggcggtctatccgcactggggcgtggagtaccaggcatatccggaggcgaaccagacacagattgcgaaggcgtgtatcgacgccggggcggatgtggttgtgggatcgcacacccactgtctgcagggggtctcctatatcgacgggaagccggtattctacagtcttggcaattttatcttcgggcagagtatcgaccggtcggcgatgcttgaggtgacgatcgacgccgcggggcgggcatcctaccggttcgtgccggtgtatgcggcgggaggcgtgacatatcctgccgaaggcggacaggcagagtcggttttgaattatctggacggcatttcggaagcagctgtggcatcggatggaaccgtgacagaagattaactaaaattagtttacaatcagtttaaaaaagtttataatttaaagcaagaaagcttccttctgcgcggcagaagaatatcagtaaaaggagaagaagagatatgagttacatggagacttacaaagagtggtgcacaaacccgtattttgatgagaatacaaaggcagaacttgctgcaatcttgaaacctatgcaaagcagaacggcttttccaatctgcgctggtacacggacgacggttattctggtgcgaactttcaaagacccggttttcaagccatgcttgcggacattgaagccggaaaagtcgggacagttatcgtaaaggatatgtcgaggttagggcgaaactacctgcaagtgggaatgtacacggaaatgattttcccacagaaaggtgtccgcttcatcgctatcaatgacggagtggacagcgcacagggcgacaatgattttgccccgctgcggaatatctttaacgaatggctggtgagagatacgagcaagaaaatcaaagcagtgaaacgctcaaaaggcatgagtggcaagcctatcacaagcaagcctgtgtatggctacctcatggacgaggacgaaaatttcatcattgacgaggaagctgcacccgtagtcaagcagatatacaatttctgccttgccgggaatggtccgacatgaaagagtaaatatcaactgtgcgggagtaaattctaccacataagcgagcagtggaatttaaataaaaaatttagggagctgatgtagaagagggaaggattttgcatcttcctgcggtttgtgttacaataaacgcggtattgcaggatcaacaagggagaattagatatgaaaataacatggaaggcattgctggcgttgtttttttacacgctgggggttgttggctggttctatgtaggaggatggatgatcttaagaggaccggtcagaggagtgattctggcgcatatggcaggagatttgtctctgatcaagctggcggtcgcactggtgcaggggtttgtgtatctctcactggcgggaggcgtctggtgtatcggctatatgttgagcgatcatttccggaaagatgagtaggattacaaaaaggtgcggcggatgacgcacctttttgcaccgtaaatggatataaaatggcgcaggaagaggcgcagacaggagcaaacgatgatattaaaagtaccgtcttactatgaaaagtttcactgtattgcagatcagtgcaaggataattgctgctatggctgggagatcgacatcgatgagggtacgatggattactaccgcagtctgggcggagagctgggaaaagagattacctcgcatatcagggagggtgaggagaacaccatgattatgcgcgaggacgggtactgcccgtttttaaatgaaaaaaagctctgcgacatctgcattaagatgggcgaggaagcactgagcgagatctgcaccgagttcccacgctttaccatggagtatgaggacgtccgggagaagatcttaagtctggcatgtgaggaggtcggaaacattatgttttccaccgacgagaagatcacctggcaggagcatgagatgccggatttctgcgggaccggggacgacgccgaggcagcttatgatgccgacggggcattgtacggtaatgatgaggcagcgtgtgaggatgatacctccgacggtgaggggtatgacgacgatgaggaagtgtctgtggatgccgatcagctgaatgccgtttctaaggcggcggtggcattgcttcagaaccgggagaagccggtggcagagcgcgcggcggagtatcttctatattgtaagaggatgcagcaggaactttacggataccacacaggcggggaagtaagcgggcaggagcaagagcagcgtgagagccggctgattgccgagtgcagggagaaagaggtaacgcctggggaggcgtatgcggcgtttcttgcacgcatggagcgctacgaacagctggaagtgctcgaccagaactgggaggaagaaaagaaacgtcttcgtgcagcattccatgaggacaattatctggaatgtatcaggaactttcacgcagcgcagcagggaagggaatatgagtatgagcatctgctggtctactttacattccggtattttatgagatcgtattatgatgacaacattttaaataaggcacagtttgcggtggcgggtattctgatgatccgcgatatggatgcactgcgttttctggagaacggaggaacattctccgtggaagaccgggtggcagtggcaaagctgtattcaaaggaagtagaacattccgaggaaaatatggaattcctggaggaggatttccagtttgaggatatttttgcaccggaacagatgatacggcagcttttctttgcttcatagggaagacggagaacatcaatggagcgattccgacccacccaaggcaggaagcactttatatttcataagcgtacgatcacagggaaagtggcatagaatagaaggcaggaaatctgccaggatggaggaaagaacatgaaagtaatattggtaaacggaagtccgagggaaaagggatgtacttatacagcgctctgcgaggtggcaggggctctcgagaagaacggcattgagaccgagatttttcaggtgggtgcaaagccgatcgccggctgcatcggctgcaatgtctgtcttaagaacggacgctgctttgtggacgatccggtcaatgaatttgttgagaaagcaaaaacggcggacggttttgtgttcggctcgccggtgcattatgcggcggcatccggtgccatcacctcgtttctcgaccgcgcattctacggaaagggaaatgtgtttgccggaaagccgggggcagcagtggtgagctgcagacgcggcggcgcggcatccgcgtttgatcagctgaacaaatatttcacgatcaattccatgccggtggtttcctcccagtactggaaccaggtacacggaaatacgccggacgaggtacggcaggacgcagagggactgcagaccatgcgcacgctgggcagcaatatggcatggctgctcaaatgtattcaggcaggagcggcagcgggaatcacattcccggagcgggaacctgcaatgaaaacaaattttattcggtaaaagttcagtggaaattaagagaaattaagacaaatttaaacagtgtcattgtctaaaagtggcggaaattagcctataaaatgtgaaaaaccgtgtatttactggaaaaattagagttgtttatatacgttatgagtcgcgtaaaatattggaaaaatggtgtcagttagtaacacgttagtaacaatcgaggattttctttttaaggaaaacgaattttttcgatttctgtctttagatcattgattgagcggtggccatatgtagcgttggttatatcatttccgaaagagtgtcccatcatacgtttgcggtcattttcattcacattatatttttcgcatagatatgagaaagtgtgcctgcaatcgtgtggagtgtgctttttcccacttgcagaatatgagattgaaagtttttctaaggtggaatacatgtttttgcggaataaagccggggtgcagcctagaagattttgtaacgcttttgtattatcatatcgctcggcaacaaaattttggatgcaggaatgaatgggaacgattcggtttttgctagctgctgtttttacaccacctttaaaataagcttcgtccaagtggacttcaatagatgcatatgctcttattcggaagccgctgtaacacataataaggatcatttgaacgatgggatcggctttgtttgtccagagaatatttagttcatcaagagtaaaaggttcgcctgattcatcatcatcggggattgggatgtataaaaaggcagagtaatctttttcgcaaatttcgtattttattgcgaaagcatatatttgatgtaggagtgatacgataagttccagtgaggaatgctttagggggcaattatttataatctgctggaggtcatcatagcgtaaatttccgatgggtatatcgtggatggcagaacagtttttgtaggctgctcgggttgaggcaatcgtttcttttgaaaaattttttggtgagttgtgaaatttttcgtcaaagaattgttgatagacttcggcgaatgttggtgtgcgttcaatgaatacggagcggtttattttgattttcccggctttttccatattgtaggcggttaagagttcataaccttcttcccaggtttcggtgtatgcaagtgctggaggcgtaacgggacctgtaggtgtccattcagtaacgggaggatagacagcatagggtttgcgtctgtttccacttagacacttgattgagccgaaaccattagggagtttcatgtgttttttgcgatttctcatatgcatagtcctttctattttgatccttttttctttaatgcaagaattaaagctcgtgcagcttccagatcctctggtggtgcatcgtgtgcggcattaaaaagttgctgcagatatttgttattgagaatttcttgtgctattctggttgttttatcatatttttctttagtgtttatttccatacctgtcaatagataatcaacagaaacgttaaaataatttgcaattttttgtaggcgttcggcggaggtttggccggtttttaatttacctatagatccgcgtccgaaaccgagatctttttcaagtgctgtgactgctaggttgtgttgcttgcagagattgataattatttcatatgttgtcatggttcctgtaatattttcttctgccgtcagatgatcaacggatgtattgagaaatagtgcaattttttttagtttgtccattttgggtatacttcgaccggttttccaatctgaaaaggttgattttgttattcctgttccttttgcaacatcagaatctttgtagccgagggaatttctaagtttgcggtaagtttcgtacatttaatgcctccttttgttggaagtgtatttattatgtgtttcaatttataaattatatcttatatcatatttgcgaataaaaagctatataatccggcgtaatttgaggagaaagtgtttccgtatggaaacaaaatatatgctagtatgtagttggcaggaagaaatttccagaattattattggaagctctattgtatactttactcggatagggggtaaagttgggacttaataatagagtacagatgtatcggtggaaaaagaaatggtcagaggaacagctttcaagagctgcgggtgtgagtcggagtgttatttgcaaattggaaaatggtgctaatgtgaatccaacggcggaagttgcatttcggcttgcagatgcgcttaatgtggatgttagggagttgttttattacaaaggaggagagcaggatcatggtggatgaagcggaaaaatgtaggcgtgaaattataagggaagtaagaagtattcaaaatttgtggatattgaaacagatttggatggtaataaaaaatatacagaattgaagcaaggactagcataatgctagtccttgtttagtgtttcatctacaattcgttcgagatcgtcccagaattcaggttttgcttttgccagtgcggaaacaaagcgtttgcggaatgattcgtcttcgtcagacataatgcgattagcgaaatctatgatttcttgattttgtgtctggggtataaacatttcaccttttccagttcgcaaccaggtttcatttacattaaattcgcggcagattgatttgcacatttgttcggtaacattatttataccgttttcaatacggctgatagcgactttgcttacacctagttggctgccgaatttttctagtgtaagaccgagtttttttcttacttctctgaccctttcgttcatattatctcctttcatatttatgttataacgcgagtttataaaagtcaatcggaaagtaaatataatttacaaaattgcttgacacggtaaatataatttagtaatatgtaaacatagataacaagagggggtgtgagttaagataggatgattgagcatgaaaaggatattttagaaaagttgggaaaagctttgccgcatatgagtgagtttgataagggatatcttactcgtatggcagaagagagtgcgagacaggctgtggatgatgaaaagaagagtaaagaacttgtaggggatcgataacagcattatatataggactagaagttgcgatgtcgcaacgggaaggagagaaagccttgacacaaagggtaagcgtagtagcggcagcaaaagagattggatgtcatccagagtatttgcggaggcagatgaaagcgggagcctgggatcttggaaatgtggtgaagcctgcagctaagggaggaaataacgagtatttcatatttcgcactaagttggataaatttttgggaaaagagggtgaagaggaatgactgagtatgaaatggttgaccttataaaagatacggtatctcttcttgtgacatttggagcagttattggatcgctttgccttttttatgctttttgtatgtttgttgaggtgactggggatttttttgaggctatgaaagaaaagatgaagctatttcgcactaagcgggataaatttttaggaaaagagggcggggaagaatgagcaagcagattattcgatgtttggattgtgaattctgtgaagaatatagaaaacttggaaatactagatacgagtttttttgtaaacattcggatcaagaatatattcatgattattttgaggagcatcgtatgagttcaatggcaggatttttagggttcggaaagatggaggtgccgttgaagacgagtccggcatggtgtccgagaaaaaaaagtaaggggtgaagctattgggtgaaattgtagtaaagaatctaacaacgcttacagatgcggccgcattgatacatgttgcgttgtatttgacggatacagaatcagtagcggaggacaagtatcatgtgaagatgaatgagactgtgacagggaagcttgtgattgtgattgcggagaggtgaagaaaataaatgatccggcagacagtagcggaatatttgaaagaaagagtgaatgctggaaatgtgcaggacgaaagagaagataagactggtgatagcagagaacaggaggtagcggatgagcattaagtttggtgcagatatttatgctccggaagaagtcaatgagctggcaagagcatccataggttacattgaatcagatgtgatggatataaagaaacgatatgtaacgttaggcttccacctgtatgaaatggatcagtgcagatactatgaagatctgggatatgaaaatttgtatgaatgtattgaagcaaattttgcaatggataaatcagcggtgtcgcggtgtattggtgtctggaaagcttttgcggccgtagacggtgatggatctcgtaaaatgtgggtagatgacaggtataaggacttttcgtactcacagcttacggagatgctgccgatgtcggaacgggatcggtataggatcagtagtgatatgtctgtaaagaagatcagagaagtaaaacaacgattgaaagaaaagaaatcatcggagaacatgaaacctgttgtagagcaggaaaaggataaaatctcggcgcgtggaacaagggtaaatgtcagagaagatgatgtggttgcgacgtcgcaactggaagatgcagtgaaagatcagcctgtggagatagtagccgatcagtcagatcagcagagacagccggacttcccggatatgaagaatatgcaggaacgagaggactttgttaatacatataaggattggaaagtctggtgcaggaatgagctgacggaggaggtcttttatagatatgatctgccggatggtgcggctattgtggttaaggtattcccgtatattccgtgggggaataaaaaggaagccgagggtaggagattatacctgttaaaaccaggatataagcattttgcagattgtgaatctaacatgacatcgctgaaagagtatcttaaggatttgaagaaaaagaagtaggatcgcgtctgttccggcgtaactgaccgtagcatcaaagcaggacaggcaatcggctttggagacagagccgtaaaaggaaaggggctttacggcggtaaccgtaaagcccagtaggaaaatcttttcgtataaatacgaaaatgtaaacatacgagattattctatagcattttcgcnnnnnnnnnntaaccgtaccttgataactgaataggctgtagcgtgatcgatagccagacaataccctagctaacatgcggatgatgccgcgggggtatgacttggtaatatacccggagaagcgaataaagtgtgatgatgccggaggaacggtagcggagacagccgtttatttataagggacttgtttgtcccttataagcgtagatcaactatgcgtttataagagataaacaagattatctcaatatagaaggaagggagggtgatttccaatggaggcattagtgaagcattttggtgctggtttactggcaatggcggtaattgcagcgcttgcggttattgttcttggtattgtcaagtctgatgcagtaaccgcacagtttcaggacactcttacagcgttttttacgaatattcgtaacattgcgggattctaggtggatcttgaatggagttgagggaaactggtatggctggcacgtatagcagaaaggaacctcttatctgctatacgtgttggaagagaggaaacggtgaatggaaaaagagtttgattttacaccaacagaagatcagtttggtgtgttctggaagtatctcatgcagccggaagtgactggggttaattatagcaatgggatgctttggattacagatcttagtagaggcaggtatccggtacaggatgtggttaccgataagtttttaactcaatttgcaaatacaatcgccaatagtgcaaataagcatttttcaagtgctgatcgggtgctggaagcagatactcgggatttaaggattagtatactgcatccgtccattgcacgcacggggatggcaatatcattgcgcaaaagcccgccggtgttgcggcatacagaagagtctttgattgcgtccgggttttgttccagagaggtgttgaatttgctaataaattgtgtaaaagcaaagttggtgattgtgtttggcggagagccggaagctggtaagacagagcttgccaagtttatgatgcaatatattgatccggcggatcgagtgattacgattgaggattcgcttgaactgcattatggtgagattaacccggggcatgattgtctggaactgcaggttagggatggatttgattataaggcagctatcaaggcaagcttacggcaggatccgcggtggctgatgttgtcagaagcgagatcatcggaggttgtgtcactgttggaaagttggagcactggaattgcaggatttacaacgattcatctggatgatgttagaaagcttccggatcgtattcagaacatgatggaagataagaaggacgtggaacgtctggaaaaccggatttattcggatgtgaatgtaggcgtgttgatccggatgcggacagaggcagatggaagtatcagacggtatttagaccagctctgtttttataccagggaaaatggtgaaaaccatatgaatctggttgtagaggatggcaggatggctgacggatcgaaagaatttccggctgatattatgaagaggatgcgtgaggcgggaattattgatccttaccgatgtacaaagggaatataaccgggaggaggtttgttttgaaagggacagggaaaagaaaaagcagggaagaatggaagttgggaagtatctggaatcctatgaatttgcagaaagaagtgcacaggtatgggtataattttgagtggaagacatatttgctcactatattttttgtatttcttctgattggtgttgtgggaatgttctttaaacttaggatctcatacattgtggcggttggagtggtagcactttccatgttaccggttttgatcattgacatgtatcgtcgtatgtttgaacagaagcggtttgcggatgccacggattatatggagcagatattgttctctttccggaaagaacggaagattttacctgcgttgagggagtgtgagacagcacttccggatggacagatgagggcagtaatccgagaggcagtagcgtacattgaagctggaaatgccaggactgaagagggtgtatatccggaagctctggcacttattgaaaaaaaatatgcatgtaaaaagatacacacggtgcatgaattgctgattagtgcggaagaacgtggtggagatgtaagtacatctattgatctgatggtggaagatattgaagtctggaagcggcaggtatatgagttgcagaaagataaaaaggtagggcatacagattgtatattttcaattgttggtgcgacgctgacaagtggtcttgcggtttatcttatggatcaggttaaaagtacgatgggatcggatgaagtggctagtatatttacgcttttgcctgtgcagcttacctcatttgtgctgattctgatatgcctgtttacgtttgctggtagtaaccggaagcttgtgcaggactggatggatggtaagaagaaaaaggatgtgctgcatgcgtatgaatatctgacaaattatgatgctggaaaagaagggagaagaagcatattgctttcgcttccttttttaattatcgcaatcatctgtgttgtgcttgatctgatcgcggtcgcaattatatttgcggtattggcagtgtttatgctgtttcagcataaagtcaactgtagtgtttacaggtcagatgtcaaaaatgcattgtatgaggcattgccggagtggatgtttgatatggcgctgttgttacaatataacaatgtacaggtatcacttgcagagtcgatatctcatgcagagccgattttgcaggcagaacttatggcgttggtggagcgtattcgcaaagatccggatgaaattcaatcttatttgctgttctttgcaaacgtggatattccggaaattgcgacctgtatgaagatgctttattctatgtcgaatgatggaacgggtaatatgcaggtgcagatttcaaacctggtagcgcatgtgaataaactgcgggaaaaggaactggagttgaaaaatgaaaagatagtatttcaggcgcggatgatggttatgtatccggtagctgctactacggtaaagctgcttgtagatatggcatccggtacaatgttgctattccagcttttcggtacaatgatataggaggcatggcatgaaagtagtgattgaagtatatacaatactctggatactgcttttgacgatgagtacggggttatctgttactgtggcagaggaacgtgcggcacaggcaaagcgggtgaaagcggaggttgttgcggagattgagaacagcaattttaatccggatgtgattgaagcgtgtaaatccagcgcgagtgtatccggatttgatctgtcggtgacgccgtgtacatacgatcaggcacatgatgtgacgtctgcggaagtggcgttgacctatacgtataagattccgttgcttggaattgaacagacgaggacgacggaagggattgcaaggtaggaggcatttatggaagaggttgtaaatgaacttgggctgggaattttaatcatggcaatatccagtggctttgttgggttgtttgtctgggtcttgaatcagatatctgcatggtaggaggcgtatatggaagaagtcgtaaaagaattggggatggcgctgctttatatgggaactggtcttgcattgctggcacttgtatttctggctttgaaaagtaatggagttcttggcagaatcgtacttgcctatatgaatggtctgacaggataggaggaagcatggattttttggtgaagcattttggaatggtggtactatatgcggcctgtgcggttgtggttttagggcttgtatttttacctggtcagagtggtttgttaaaccatataggaagtacgatgagcggatggagggcaacagacacatccgggtatacagtgtatgtttcggaaagtcagaaagggtatccggtagtagagtattccagagcggatgcccttacgacgggaacgtattctatatcagatataattacagcaaaggactgcaatggatatgatgcgaggctggtagtgcttggaatgacgttgccgggaagcggtgaagctgttattgacagaagtgcagtggaacttgcatttccagtgcgaggcatgtacacgctgcgggtagaagcgagagacagcagtcagcgtacagtgataaagaaactaacaattcctgtaaattaggaggtgctgccggatgaagaatatagcggctatgtttggagtgttttttttagggattctggtcgtggcttgtgtgatgacaagtggcggcagaagtaacagggagatggagctggcagataatctgccagcggcggttgaggaaaccgtgtcagaattgatggaggaaaaaaactatgatatcaccagtgaaaatgagatgattgccgatatggtagaggatctgtccagaaaattggacagcaatagtgatataactgtaaatatagagaatatcgatgaagcaaaggggcttatgtcgataaaggttgtagcatcgtatcagcatccgaacggaaaggagggcagtgtgtcatgtgagcggactgtagtctttaataagttgcaggacgatccggcagagttatgccaggtaagattccttgtagatgatgcaaggatatataaaacctgtaatgtatggccgggtgatacagtatctgctccgtcggaaccaacagtttccggtaagacttttgattgctgggtagatgtggagggaaatacggttgattttactcaaccggtaacacaaagtcaggtttattacgcaaaatatagttgatatatctgacaagggatattatacttgtagtgagagtgaagattacatttttcattagatatataaggaggaacttgttatgaagatgaaggaagtatggaagcggacgacagcatttgtggcggcggtagctatcagcattgggatgtttgccggaacgccggtaacggcaaaagcagcggatgaagcaggtatccgggcgtttgtgacaagaatgtatgaggtatgtcttgaccgtgagccggatgcggcggggttggatgactggtcgaatcgtcttgcaacgggacaggagcagggcgcaaatattgctttcggattcattttcagtgacgagttccggaacttgaacctgtgcaatgagcattatgtagatgccatgtatgaagcattttttgaccgtgagccggatgcagctggaaaagcggactggctgggacagttgaacagtggtgctaccagggggcatgttatgacaggttttgtgaactcacaggagtttgcaaatttgtgtacagcttatggaatcgatcagggatcgggagattggagtgcagacaatattccggtcagtggaagctgtgcgatctgtgacagcggcagtcatgaagtgacgccggagattcaggcatttgcagaaaggttgtatacctgctgtcttgaccgtgagccggatgcggcggggctgaatgattggtcaacagctcttgcgaatggggcaaagggcagtgaagtggcttccggatttattttcagccaggaatataagaataaagatgcatctgatacacagtatgtgctgatgctttataagacaatgcttggaagagaagcagatacaccgggcgttacggattgggtgttacagcttagaaatggtgcttcaagagaagccgtatacaatggctttgtaggaagtaccgagtttgcaaatctttgccagaatgccggcattacggttggtggtgcgattgcggataatggcaccacgggaagacagagtacgggagaaatggtaaagaatatgtattatgatatatacgtagatggagagtatagaacaacagaaggagatgtaagttgggcagtagaaggaacattagtaaatcccgcagatgactttttgttttcccatagagtggagggggatgagtttattgcttatgaaggtgctacaggaaaggttaatataattagcaatggggatgttattatatgggactaatctgtatttagaataaaatatgttaaaataggagagtgttcttatagtgttgtagctgtaagagcacttttttattttgtaagaagaatagagtgctagggagggattgtttattgttgcgagaaagtaaaaatttaaagagacggtggatacaaggtatttttgccgtggcatttgtcataggattttttttgatgtttgccggatcgtcggtgacggtaaaggcggggacgttggaatatcatgccagtataagcagtagtatgagcggaaatgatattacatttacctgtgacttggatcagacgatagatggacagcagatgagttatcagtggcaggaaaatcgtggaagtggctggcaggatatttccggggcgataggatcttcttatactgtgggtaagacgggaagaggtggataccagtatcgttgtgcggtaactgtggtaatcaacaattcatattcgctgttgaatgaggattataaggcatttttgcacagagaagggtctgtgccggagtttcaatcctggtggccgcatctgtatggacatacacagaacagttatttattagaaatttatgatcggattggtatatcgccggtgaatgaagctgcccgtgtggcaacagaaatggtatttagtacggaatatatggcaaagtatagtaattcaaatttgaattatagtacggatactaatttggcaacacggaatggaccgaaacagcttattgtagactgttatcattttttgttacagcgtgaaccgtcagatagtgaggtggaacattggtataatgagtacataaatcacaatactaaaaatccattgattgaatatcttgaccctgcaacaggcacttatcaacgttttagaacttatgctggtatgggttatgtgcttaatcagattgcagcatcggacgaatgtgccagcaaaatggcagcggcgtattactatgacggaaaccagggcgtgttcctttatacggaaagcgatattgaaactcggtcggatacttaccatgttacaagtgatgttgccacaattccggagaatgcgtatcaggtaacgctgcagaaaggtaacggtgttcagagtgtcagcggtgccggatcttacacggtgggacagagtgtgacgatcaatgcgacattggcaacggggtatcactggaaaggctggacaggtacatatcagacgataacgaaaagatatactttttcgatgccgggacaggatgtatctatgacagcaagtgcggaaatcaatcattcgactttgagggttgatccaaacggcggaacctggaatgggagtgctgatgtgcagagcttttctggagattacgggacaacaaaatcaattccagatccggtaagaccgggttatacatttgcaggctgggtaaagtcggatgcgttccatggaagcttaaataatgcagtatatacgtttggtgcggaggatggcgctacggaaaatcggaatttgtggagagatttcttgaactttccttattttacgggctttccagccccttaaatagtgaaatgatatgtattttcccttatttttgaccttatgcggaatcagcaagggaaataagggaattttttatttagtcgttgcctgccactttatcaagaagtctggcggagttccgctttgcctttcttgtagagtgggcgtagacattcattgtggtactgacatcagagtgccctaacagttcctgcacatcttttggggcagctccgtttgagaggaggttgcttgtgtaggtgtgtcgcaactggtggaaatggaaattctcaaatccgtccagcctttttgcaactgatcggcaggcaatgctgagtgtgcttggcagttccagacatccgtccggtctcaggcagacaaaggagatttccttgtaatctaccgggatttcttcggttccgtccagatgataatattcataatacactctgtttttgtcctgtgcttccttgtagaaattgcggtggtaaagttcaccatactgcatccggcttttaagctgtttttttctggcggttttcagtatttcagtcagagtatcgccaaaatcaacaatccttactttctttcgcttggtcggtccgatgatgtttttatgttttgtgccatcatagcggatacttcttttaatggtcaggcattgttcttcaagattgatgtcctgccatgtcaatccgcaaacttcaccgatacgaagtcccgcatagtatgcgatctggattggcaggattgcaggtggattctttactttgaggtattctatcagtctctcataatcttcatgggaaataggctgtatgccttcttctacctcatcatctgagaataaatccacatcctctgcctgttttttcagcttaatatactgcataggattaaaagtaatcaactgttttggaaatactgcaaaccggaaagcctgttgtaatactgctgaaaaggaatggatgtaatctttactgtatccttttctcacttttccatctggaaattccccaccgaatgtaagcagatcgagaaatgcctgtaaatgttcagcagtaacggtttttaatttgcgttctgcaatcggatgtttcttgatacaacggattgcaccaagataattttccactgtaccattgctgagtgttccgactttcagttcttcttccgcccacatatcaagaagttctcctacagtaagattatctgtctttgcgacaaatttcttgctttcgtaatcatccattgcctgacggagcagtttttccgtttcacttttactttctgttccagcgtattctttctgaaccagattgccgcttgcatcttctacatagaagcggtagtaccatttctttcctttttttcttacagatccttttgccataatcgtgtgtctcctttcgatatcagacaatcggaactgatgaaatgcttcttgcgtgtaagtatatcataactccggttgtcgttctataccgaatcggaatcctcatacaaaacttctgataaaagattttcaagcctttgtatgaaagagtaaatatcaactgtgcgggagtaaattctaccacataagcgagcagtggaatttaaataaaaaatttaggggcagaagaaattgttttacatgagatgatttattcataacggtatggtagaataattatcgcaaattgatatctattcaactcaacgttgagactcccttcaacgcttagtatgttctaaataaattctctttttgatatactgaggtcaaatatagtataaaggagatttgttttatggatcagaaaaaaataggtgcatttattgcacagtgtagaaaagaaaaaagtctaacacaaatacagcttgccgaacttttagacattaccaatcaggcagtttctaaatgggaaaatggtagaggaatgccagatgtgtcgcttttacagcctttatgtgatgctttgggcattagtttgaacgagcttttttcgggggaacatatatcagcagaggaatataaaggaaaagcagaagaaaacatttctaaactttacaaagaaaagcaaattgccaatcttaagccaataaaatacttattctctatatgttctaatgtaacattgcttgtagcagtgattgaattagctgttggttttattggaaatttttttaatccaactatattggaggtaatgttgctcaatgcttctgtgtggataatattgtttctgatttcagtgggtaagctgacatacgataagaaaaaattgaaaaacctgaagcattcaggtacttgtatagactctgaaatcaaggatataatcccagcatcatggattagagttggaaactacatcagttgcagaattgtatgtggatttatttacgaggataaggaatacaaagcagtaagtaattactatgttttgacaccatttcaacgaaaggaggatttatatgcgaatgtttttatcgagcaaaacaatcctaccaaatatagtatagagctttttcaagaaggtcggtaattcagtcaagaatttctcaaaaatcatataagcctatttaaagctgtcgttgcaggaaagtcccgtgacgacagctttctttcttaccgttttttcctctgactgataggcgttcccattttctttgattttttgagaatccgaatcagccagcgaaattcttcatctgacagatttttatagttgatgccgagctgtttacagtaaaggacaacgagcttttcatcccggctgcccttgaaattttcgaccgcttccagattttctttcagttcatcggcaacggtggtctggggcgcactctcgctgtcctttttgtgggcttcccgaatatcccggataatgaggttgaggtcatccagcaccatgtggctgaaatattcatcatcgctgatatgggcggcttgcagcactttcaaatgggggtcatcttcgccggggcgataccgttcaatgatttcatgccggacggtatcaacaagggcgttgaggttctgaatctgcatggtggcaatcccatccacataaatctcaatgtccgcaagaaacttgataaagtccttatgcgtggcaagttcgcacagcagacggttgttaatccgaccgcttttcagaagtgctaccatctcatcactcaaatgcagctcccttaatggcgtgttgatctccgcccggttctctgtccggcaaaagagataatcgagggacaccccataaaaatctgccagcgtgataaggttgccatgattgatttccttataatcctctttttcataacttccaagagctgatttggaaatactcgtcaactctgataattcttccagatttaagcctttgtccttgcggagttcccaaaggcgttcctgtatgcttgttgctcctttcatgggcacacgctcctttccggcggtttcattgctgccgcttaactggattatatcacactttccgcaatcgtggaaatttctgatttttacccctaattcctactttgtggacatacggcacagggcacaaaaatgttctatgatacaggtagttcatcgatggattattccaatcgaatgaccagcctgtgtgggatatgcttccccggcgatgtagtgccatgacttttggcagggatgtggaggaaccctgaccgaaacgagcataccaaagggagcgatacgccgctgtgagattcaggggaggaacgacaccgggagaactggcgaactgacaccgaaatgataccgaaacacgacaatctgatagggggatagtctaccctatcgctgatacttcgggagattttaggcggttctatgactgtaattttgccgaaaatcgccccgaaaccatacactaaaacgggaggaagcgcaatatgccgagaatgagcaaaaagaggaagcatgagctttccttttacctcaatgaccgggggcgtgtcacttacaacgaattatgccggaaatgccannnnnnnnnnnnnnnnnnnnnnnnnnnnnnnnnnnnnnnnnnnnnnnnnnnnnnnnnnnnnnnnnnnnnnnnnnnnnnnnnnnnnnnnnnnnnnnnnnnnnnnnnnnnnnnnnnnnnnnnnnnnnnnnnnnnnnnnnnnnnnnnnnnnnnnnnnnnnnnnnnnnnnnnnnnnnnnnnnnnnnnnnnngtgacgatagacacaccattgccgccctgtatgccattccccagagcgttgacaggatttccagtcagcagcaccgcaaaggtcatgtactgccggatgctggacgctatgctatccaaagggcaggaggacgagaacggaatcctgtttgtctgcttccctatcacaggcattgccgcagtcctgtctcgcagccccatgacggtcaagcgttctctgaatgaactggaaaccgccggacttatcatgcgggtgcgtcagggcgtgggagaaccaaacaggatttatgtgctgataccgggaaaggaggacgctgcccttgcctgatacctcaaagctggaaaaactcaaccgggagttggagaaaagcgaaaagaagctacggaaagccatcaatgatgaaaaggcattgcagcaccagttgaagcagcttacccgaaaggaacggacgcaccggctctgcactcgtggcggtatgctggaaagttttctgcaagagccggaacgcctgacagatgatgatgtcatgctgttgttgaaactcatttttcacaggcaggacacgcaggaactattgaaaaagctgctggaacgggagaagccggaaaccccttagtttactaagggcgcaattatacaccacccagaggttggtgcattgcgttctccgaaggctcctcgccggagggctgtgattttccgcagtcatggtctgctccaaatcatacaggggacgctacacttcccctgcgctggctgcagccagctacccttttgtggacttgccatctggggacactttgcgttgcaagttgttcccagccgacaagtttcataaaatacgctatcttttcgataggcgatgaagtataatgaagatgacaacaaatcggaatttgtggagagatttcttgaactttccttattttacgggctttccagccccttaaatagtgaaatgatatgccttgatttcattataatagataaaaagatattgaatatatatgcacggtaaaaagacgattctcaataaatgagattgggaaaaagtaaccttagtgctgttgaaaaaatcaccatagttctaatgaatcttctgcatctacccatatctgcattgtttcatcaagatataattttgcatattcaagcggtttatcaatggcaagtgcgttcaatgcacagtctgatccgggtgtggttcaaattccgattgagatttcacctgttttagggaatttaataactgttatattttgttattaaattctctgcaaacccttgaaaacactggatttatcgcaggtgagctttcccttattgtttcccttgtgttatatcgtcccgtcagcgtttacgaactctgataagggcaaatacaagggcaagaaaaatctataaaacagtataacacaaaataaaagtgacatggtgaactgattgaaatgcttctgatttttgtaacaaatgactgattgaatgataaggagattctatacgatgagaacaatatttgcagaatacaatccacacagaaacagcattgatatttatacttctgctggttatatgctccgcattgactgttgggaagccgaaaaggatttaaaaaccacacccggatcagactgtgcattgaacgcacttgccattgataaaccgcttgaatatgcaaaattatatcttgatgaatccaatgtcatcaattcttgattcatgcttgccctcctgtcctgttttttcatttttctaattatatcatgtaaatgtgaagaaatctacgtcctcagataagttgtcctgttttttgaaacaggattgtcctgtcattagcctgttttttgaaaaatccgtcataaccataatagaaggagcgaagcacctgccaatcacggcgggtgcttcgtgctttccagaatattatgaacggagggttttctatgacaatctatgaaaccatcaaggcggcaatcagcgtcaagcaagccgccgaacactacgggctgaaagtgagccacaacggcatggcttgctgcccgttccacaacgacaggcatccgagcttgaagctgaatgaggactattttttctgcttcggctgcggagccaaaggggatgtgatcgaccttgtggcaaggctgttcaatctgagcagttatgaagcagcgcaaaagctggctttggacttcgggcttgacccgaaaccgcccactgccgcagctatggtcaagccgaagcgtccctatatccgtcagttccgggaggatgaaatgctgtgcttccgggtgctgacggattatttgcatctgttggaagattggaaagtgcgctatgctcccaagacaccggaagatgctctggatgaccgttttgtggaagcctgccagatgcactgccatatcgaatatatggcagatgtgctgacggtgggtgatctggaagaacgggtggcattggtggacaagctgatgcaggacggcaaaattgcttttctgcaagagtataccgcacaaaagaaaaagaaggtggcgcaccatggcgaagaaccggaaaacgcctgatatgaacttgcccatgtggtttgacgggcagaacatcaacgaagctctgttttgtgaagaatttctgcaagagcgcaggatcatcttcgcaaacggagcttttttcacgcccgatggtcgagtgacggacgatcttcctctgcgtggggagatttacgacaagctgaaattctgtgccgtaaacaatatcccccggaagatcaccaacattctggaagtgctgaaactggaagcgcaagtgccggactttccaccggagcaggatcggattcatttgtccaacggtacgctgctattgaacggcacatttaccgagggcagaccggctatcgtgcggagccgtttgccggttgcttacaatcccgatgctactgcgccggtgatctggctgaactttctggatgggttgctttacgccgaggacattccaactttgcaggagtttatcggctattgcctgattccctccaacaaggggcagcgcatgatggtgattaaaggcaacggcggcgagggtaaatctcaaatcggtgcggtactgtctaccatcttcggcacgaatatgaaagacggcagcatcggcaagatttctgaaaaccgcttcgcccgtgccgatttggaacacattctcctgtgcgtggatgatgatatgcggatggaagctctgcgccagaccaactatgtaaaatccatcgtgacagcacaaggcaagatggatttggaacgtaaaggcaagcagagttatcagggctggatgttcgcccgattgctggcattcagcaacggtgatctgcaagccttgtatgaccgcagcgacggattttatcgcagacagcttgtgctgaccaccaaggaaaagcaggtggacagagctgacgatcctgatcttgcagagaagatgaaagctgaagccgagggtatcttcctgtgggcatttgaaggcttgcagcggcttgttgccaacaactttaagtttacggagagtgaccgcatccgtgaaaatcgggaagcggtcaagcgtgacaacaacaatatctttgatttcatggaatcagagggatatatccggcgcaaagcggatgcgtccatcagctccaaggatttctatgaaatctaccggatgtggtgcgaggaaaactcccttgcaccgctgaaagcccgcagcttcagcgacgccatgattgccaatgccagaaaattcaatctggagcattgcaacaacatcaccaactctgctggacggcgggtttggggattcatgggagtggaagccattgcacgacctcatataaatgggttttacggagattcgccgtgtacgtacgtaccggaggacattccggaggaatggcggcaggtcgagtaaatcccattgctggtacgtatgtacgcagcaaaagagcgtgaaacgcttgttatagaaacagcacacatcctctcgttcgggctgtttctatgtccacaggcttttgaaaaagtgtctgtggacaccggctgcaagaggaagttgacacagaacagcttcatgcagacgggctgaccatgggaaaaggcgcagacattttcgccttggtcagcagaggtcaccgcagtgaccgcattccccctcgggagagaaagaagatcgtattcaattttcctgtgcctgttgatggtgaggaagtgaaagaacttcccttggaaactgaaacaactgccgagacggttgtcttactttccaagggcgctaaaggtccggtggacctttgctcagcgcggaccgaagtggaacggagactggtcgacagcagaaaagtgaaggtggacttctctctggagaatatggatttatctgaatttaagggaaaagcaacttatgagcagataaaggcatatgtacttgaaaagacaggactgaaggtttcttcgttgtatattgcacagattaagaagaaatgtggattggatgtgggagagaattttaatctgcctaagtcagagaatgcgagacagccacaatgtacaccggagaaggaagaagcgattatgcaggcgtttaagcattttggaattgtatagattgtggataagtagcatcatgtgttaaaaatatagtgaagtatggaaaaaaggacattccggaactgtagattttacaggtaaggggatgtcctttttactgatatggaagtgttcaagggacaaggtaatgatactgaagtattaaggctgactgcttttggagaagtttggcctgtaaaagatatcagcggtatttcgattgtataaaggctattgtaaaaagtaacacaacatgacataatcggattgactaaagtaacacaaatatttataatatagacaaaacgaaaatgacatgaacgggggacaggataatggagaaaactgtaacacttgaagaggcattaaaaagaattgaggagttggaaaaagagaatgcagaacttcgggaggaattggagtattacagaaatcgtaagttaagcggtcgtcagaaacataacgccaaatggatggcaatttataatgattttgttgttgggtatgagagcggcatgacaatggtagaaattgcgaagaggaacaatgtcagtgagcggacgatttataggtataaagcgtattatgacaaaatgaagaaaaaagaagaatagaccattttactgacgtcagtaaaatggttcaatgtgggaggagaaagtttagtatggaaaagaaaatgattaactgaaataatagaacaataataacaaatcggacatattgctgatgtcggcactatgttcatatgagaattgcggtcacagtttgtgaccgcaaaacaaggaagaaaatatatggcagaagataaaaagaaagaaattgcagtaattgaaattacagaagaatacatgaaggatcggctttatgaattcagagggaaaaaagttatgcttgattcagacttggcagaaatttatgggtatgaaaccaaaaattttaaaaggcaggttaagaataacattgccaaatttgaaggcgatgattttatgtttgaattgaatgatgaagaagtggaaaatctttcaaggtgcaaaaatttcaccttgaatatgggaagaggttcaaatataaaatacaaaccttatgtgtttacagagcagggagtatatatgcttatgacagttttgcgcggcgagcttgcaattaaacaaagccgtgcacttgtgaagactttcaagaaaatgaaagattacattttagaaaatcgagatcttataggtcggcgggaaatacttcagttaagcatggagactgctaacaacagaatagaaattaacaaaatcaactcagatatgatatctcttgaaaagcagatttcagatgttgcagaaggactgaaggatgttgtgaccaaatccgagttggcggatatgatgaacagctttgtttcagatgatgatgaaaagtggcttatgtttaatgcaaaatttagtagtgcggatgaggtttacgagtctatttacaggcaggcaaagtcatcaatatatgtggttgataattacattggtttaagaacgctggtacatcttaagaattctccaacaggagtaaatattattttatttagcgataatgttgggaataatagacttcacaacatagaatatacggatttccgtaaggaatatccaactgtaaaactgtcaatgaagaagactggtggcatattccatgatcggtttatcgtgctggactatggaacggcggatgagagagtctttctgtgtggtgcttcttccaaggatgccggggctagaataacaagcagcgttgaggattacggaatagccaaatacaactctgttattgcaggattattgaaaaattcgccattagtattaccgaaataggagtgtgagattatggaagaagaaaacaagatgttacatatatactcgtgtatctacggctattcaggttgatggctatagccttgatgcacagaaggacaagcttaggaaatatgcagaattttaggagatggagattgtaggagaatattccgatgaatggcatttcggtaagaatataaaaggtcgtcaggaatttatgcagatgttgaatgctattgaagatggcaaggacggagttgatttcgtccttgtacttaaattatcccgatttggcagaaatgcggcggatgtacttagctctttacagcttatgcaggattatggtgtgaacctaatctgcgtggaagagggaattgacagctcaaaagaagccggtaaactgcttatatctatcattgcggcagtagcagagctggagcgggaaaatatcagagtgcagacaatggctgggcgtgagcagaaagccagagaagcccggaagaaaggataagatggaaacgcagcgatggtttccgtcttattttttgaattcaaagcgctgaaagaccggattttaaatgaagaaaataaaaagtgacagaaaactttttcgtaaattgcggaaattacgaaaaatttcgttgcgcacatgggaggatagtactataatggaagtattgacgggcaccagagaaggagaatggttatgggaaaaaacgcagcggaaggtaacaggaaaaagggaaaaattgcggaggagatccgcaaaagaatcggcagaagcgtgttgatcgcgtatattgtcgtggaagttatcattgtgattatcatgggacagacggtttattacaataaaaaagcgcagcttaccctggagtcggagtcagcggcgaatcgcctggcgggattttttgaaaaatacgagagagagacacagacactggcgcttaatccgcagattcaatcggttttatcggagacaaaggcgggagataatattttaagtgcaaaagcgatgggatatgtggaaaaatatctcgtcgatgctgcaggagcggacagcgagaatgtgatggcggtgtggattgcggatctggatgcgagcgttattacgcagtcggacggatacacttccccggacggctgggacattacagggcgtgcatggtattcctgcattgagaccggaaaaacagtcctgaccgaaccgtacatagattccagcaccggagagattattctgagtgcggcaacgccgatatacgatgaaggcggcaatgtgcttggcgctgcgggaatggatatttcgctggatcatgtgacagaggtattgagcggttatacaatcggaagcaacggatacgtctggctggtgtcctcggacggaatgctcatctatcatccgaatgcggaactggtgcagcagaacattgcggatgtgaacgtttctgacaatgtggtcaatgcaatcgtgaaccagagcaccgagtttttgaaatacaaagcggacggtaccacaaaatacggttccgtacagctggtaggagaaacaggatatctggtggtcagcaacatgccgttccttgaatactatcagatgctgtttgcgacgatcggtgtgctcttggccattttcgcagtgggaattatcgtggtgatgcgcagtatcgacaagagcgcatatgcgctgtcgaaaccgatcgcggaattgaacgagacggcaagcaggctggcagagggagatctggatgtcgagctgaacgtcatggcaaagaatgagatcggagaactggcggaatcgatccgggcgacggtcgcacgtctgaaggaatacattgcctacttaaaagaagcatccggcgcactggatcagattgcagatggaaaacttgagattcatctggagcaggagtatgttggagaatttggtcaattaaaggaagcacttctgcacatctcaagttcgatgaacgatgttatgagaaatatcagcgcaagttcccagacggtgacttcgagtgccggtgatctggcaaatgcggcgcagcagctggcagagggaagcggcacgcaggcggcagcagtggaggagctggtcgcaacggcaacatccgtggcggagcaggtggaagagagcaagaaagacgccctgcaatccgcggaagagacccaaaaagtaacggctatgatggaacagagccaggataagatgcaggagatgatgaaagcagtacagaagatccacgagacctccaagcaggtggttggaattattgcgaccattgaggaaattgcagaccagaccaacctgctgtctttaaatgcatccatagaggcggcgcgtgcgggcgaggccggaaaaggctttgcggttgtggcggatgagatcggaaagcttgcgcaggaaagttcaaaagcggcaaatatgacacgggaactgattggtgtctcgatggaagagatcaataaaggcaatcagattgcagatcatgtgatggattcgttaaagacggcagtggaagcagtggacaacgttaatggaatgatccagaaaacggcgggaaatgcggcggatcaggcacagagcatggagcagatccgcgtgggaatcgaggagatctcgcagggagtacaggacaattcggcgattgccgaggagagctccgcaacctccgaagaacttgcatcccaggcgacactgcttaatgaactggtgcagcattttgaactgcagccataaaaacaccgaatcccttttgctgacattattttcctaaagtggtaaaataacacaaaagcagcaaaggaagtgtgacagatgaagatcaagtttgcacagacaatcagaaattatgaccggaagaatcttggaaaagatctggtcgccggactcatcatcatggcagtctcaattccgatctccatgggatacgcgcagatcgcgggactgccggcagtatacggactgtacggatcggtgttcccgattcttctgttcgcgctgttctcgacatcaccgcagtttatttttggcgtggatgcagcgcctgccgcgctgatcggagcggcgcttttagatctgcatatcgagagtggatcgaaggaggcgctggcggcagtgccggtgctgaccgcgtttgtggcgttgtggcttttcgcgttttacgtgatgcgggcgggaaagttggtcaactatatctcggcgccggtgatgggcggctttatcaccggcatctgcacgactattattctgatgcaggtgccgaagcttctgggcggcaccgcagggacgggagaattctttgagcttgcggagcatatcgcggagacggtgggagagatcaatctgccgtccctggcacttggcgtggctgcgcttgtgatactgctgattgcaaaaaagctcatcccgaaattcccgatggcggtgcttttgatggcagcgggtgctctgatgacaaagtatctgcccatgcgcgcctggggcatcaagacgctggatgccgtggagccgggacttccggtctggagcctgccggattttacggcggtgccggtaagggaggcggttacgatcagcctgtcggtggcggtcgtcatcatggcggagacgctgctcgcagaaaataattttgcgcagaaaaacggataccggatcaacgataatcaggagatcctggcatttgcgatgggcaatcttgccgcggcgctgaccggatgctgcccgatcaacggctcggtctcccggacggcgatgggagagcagtatcaggcaaagacacagctgaccgggattgtggcgggactttcaatgatcgtgctcctgcttggcggcaccgggtttatcggctatcttccggtgccggtgctgacggcaatcgtgatctcagctctgcttggcgcgacggagtttgagctggcggtccggctgtggaaagtcagccgcacggaatgtctgatctttgccggcgcattcttcggagtgctgatgctcgggacgatcaacggcgtactgatcggcatcatcctctcgttttccgagatgattatccgcacggcaaagccggcgcgctgttttctgggaattcagccgggacaccggcatttccgcgacctgaaagagggcagccagatccacgcggttgagggagtactcatctaccggttcagcagcaacctgttttttgccaacatacaggtattaaaacaggatattgaagatcacgtgaccgatcagacgagagcggtcattctggatgcgagcggcatcggcagtatggatatcaccgcggcggacggactgggaatgttatatcagtcgctgaaagaaaaaggcatccgcttttacatgacagagcacatcgccgatttgaacgaacagctccggaaactggggcttggctacatgatcgaagagggaagcgtgcgcagaacgattcatatcgcgttaaaagatatgggaatcaagcgcccgtatccgttggagggcggtgtggacaatgatgatcgcagtgcctcgagaaagcgcgcggacaaccgtgtgcaggaatttgtctgggcgttcggcgcggagacggaggagcagattgaaaaacagattcttttgcagattgaacagctgaaggagagcggggatgtggaaaatctgctgcacggcagatggtcgcacatggaagcgatggatgaagacgagtggctggaacatctggaagaacacttaaaggagattgtgaacatctccggaaaggatgagaagacactcgcaagacgtctggaggaacaccgcagggaggtgcatgaccgcattgcaacagaacatccggagcttgcggagcgcttcaaggagcgcagacatgtgctggatgagcacttaaagcagagaagaccggaggtctatgagcttgtggtgagcctgcgcgaaaaggaagagacagatttaaaataaagaaacaacaccgttatttaacagggtgccggagagggcaatcagcctctcaagcggcactctttttttgtctgccacccactgccggtaaatattgacggaggtgacgcataaaaacgtgttgatgatattctgctcctccctggaaaatgcggcgtagagattatgtctcgtgcggttgtgaagcatggtgtttaagaataatttatcggcgaattcgcggtagccctgcttcccgctcgtgcatggcaactgcatcgagaatggaagtgcaatgcgggcagcggcaggcatcaatggcaatctcggtcttacacatcggacagagtttgctcgttggtgcttcttctttttctcctccgcgggaacgaactttgcggttgcacggtttaatgcctttacaatcagaaatacaacgagtgccatgatcagaaatggatgaagaatgctggcaagtgccgcggcagttgtgctatactgggagacagaacgacacaacagaagaaagggagtatgatattatgatgaatccggcttcacttatgaagattatgaatgcgagaaacaagttcgttgagaaccatccgaagtttgcggcgtttttaaatgcggtattttctgcgggcattacggagggaacggtaattgaaatcaccgtcaccaagccgggcgaggagccgatcacgaccaatatgaaggtgctccagtcggatctggatttattggacgagttaaagaatctggcgcagtaacccggtgcgcgcgcactgcatatgatatagcgaagttatctatagggagtatagagtggactataatcaggagcagtttttccacgcgcagtttgatgtgcccaagatgcctttttatatgagctaccccatgcagaatctgtatctgaccgagatggagtatgagaaggatatggaccgcatgaaggagctgtatcccaaagaggttggcaggattgtggagtgtgtggaagacgaatgtgacagaatggaatacgagggcagcctgatgttcgatgagtatccggaccgcctgatgattgagatggtggtagaccgcatccagaagaaagtcacaggagaagacggcgggctggaggcagagcagtttcacggaggcatgcagccgccgcccggacacagaccgccgccaccgccgccaccgcatggacagaatgaccatctgcgggagctgatcggtgtgattttaaacaacgaaatgtaccggagacgctgccgtcaccgccgctgcagacgctggtggtaacgggggtgcgaagccccggataagatcgaaaacaattcttaaaaatcagagaaagtcattgcggatttattttaaaatgcatacaatataactatcgcgtttttgtgcgatagttattttgtgttaatagaactatcgcgtttttgtgtgcggtagttattttgcgttatataggaggaatgaccgttgcggaagggaaccataaaggcagcagtcttggcggcagtgttcatcggagcagtgcttatatttggaagatttatgaatgataccaacgaggatctgacgacggagatgaaggaggcgacgctgccggtcatcaccatgtatcagggcgatcaggagctgaatgaactacacgggtacgtgacggagatggatgccgcatatatgcgcgataccattacgccggtgggggaagaccggaagcttccgattgtgatacagacgaatcagacggcggtcgacacgatttcctatgagatccgcagtctcgatgccacacgcctgattgcgaatgcggatgtcacttcctatgaggagcgcagcgggaagatcacggcagatctgcagatccagaatctgctggaagagggcgaagagtatctgatgattatccgcctcgggagcggagaccgttcgatctgttactataccaggatcgcggagccagtcgactgctatgtgagcgagtgcgtcgcattcgtcaaggattttaacgataagacgttcaacgatgagacctccggaacactggcgacttacatggagcggacgaccggggataacacgacactgcagtatgtgtcgttaaattcttctctaaggcaggtgagctgggcggattttaagggagagcgtctgacagagccggttccgtcaatcaaggagatcacaccgacctacaacgtgatcgtgctcgattatgtggtatccagtgtcaacgagagcggtcagattgaatactataatatagaagaatattacagggtgcgctacaccacaagccgcatctatctgctgaatttcgagcgaaccatgaaccagattttccgcggagaaaatgacagcgtttacgatcagtatatccagcttggaatccgcgaagcgaacgttgaatacaaggcgaatgaggcgggaaccagtgtggcgttcgtgcaggagggagaactctggagctacaatacggtggaaaatacgcttgcaaaagtgttcagtttccgcggttacgagggaattgacagccgtgagaactacggagaacacgacatcaagatcgtcggtgtggacgaagtcggaagcgtggattatatcgtgtacggttacatgaaccgcggaattcatgagggggaagtcggaattgcggtctatcattacgacagcctggcgaataccgatgaggaactggtcttcattccgtcggataagtcgtatgaggtgatgaagtcggaactcgggcagctcatgtatgtaaatgagggcggagagcttttcctgatgctggacgggtgtgtctacggaatcgatttgaataccctctcggtgcgggaactggtgacgaatctgaacgtacaggattttgcggtgtccgcgtccaaccgctattttgcatggatggagacggagggggattcccagatgggcagcagtgtgatccacgtgatgaatctgtcggatcagagcacgcaggagattgcggcgggcaccggggaagccatcaagccgcttggcttcatggatgaggattttgtgtatggcattgccagacagtcggatattttcgaggacgccgccggaaacgtgacatttccgatgcaccagatccggattgtggatgtctcgacaaaagatcttactgtgcagaaaacatatgaaaagagcggctattttgtaagcagcgtgtccatcgaggactacacgatgcacttgaaccgcatccggtataacggcacggcatatgtcccggcggatcaggatatgatcatgaaccgtgagggagattctggaaagcttgtcaatattgcaacgagcagttctgcggaaaaggagacccaggtacagcttacgattgccggggcatccgcggaaaaggcgccgaagcttctcaccccgaaggagacgattttggaagaggagcgcacggtggcaatcaaggaagagggcagcacaaagcattattatgtatgcgtgaagggggatgtggtgctggcgacagacgatgtcacagaggccgtcacggcggcaaatgacagtatgggagtcgtgattggggataacctccagtatgtgtggaaacgctccagaaagtccgcacagccggcactgcctgatattgcggtcggtgcggaggatgccggagcaggaagcattgcgcagtgcatcaatgccatgctggaaaaagaaggaatcaatatcagcgtgaacgcactcattgagggcggagagacgccgaaaagcatcctgaacaatacgatgaaggatatgcaggtgctggatctgaccggatgcaatatcgaggaggttctctactatgtcagctgcggcagtccggtattttccatgacaggaagcacggatgcggtactgattatcggatatgacagcaacagcgtcgtgatatttgatcctgcactgggaacgacataccggaagacgctgaccgaggcggatgagatgtttacggcggcaggaaatgtatttttcacatatctggtgaaatgaaaatgcataaaaaagcacttaaagtagggaattattcgtgtaagtttaacagatttcatgttcttctattgcaaattggaaatagatgggttatattttgagacgtagtacttgaaaagaggaaatggagagattatgagcagaaaagagattgttgtatcgaatgtctcagaggaacatagtaatccgattgcagaactggttcaggttgcctgcagatttgacagtgatattacacttgagagtaacaaccgccggataaatgcgaagagtattatgggaatcatggcatttaacccgtccaaaggaatgacggtgaacatcgttgccgagggcagtgatgaagaggaagcattagtagcaatggaaaagtttttagtatgtgagtagtttttttgatgaggaggagggctctcataatggaaaaaaagacgacagcgaaacttgatgagactaaggcagcagtaaaggcagcagaagcaaaagttgcggcgaaggttgaggagaccaagacagcagcgaaggaagcaactgcaaaggttgtggcaaaagtcgaggagacgaagaacgcagccaaagagacagaggtaaaggcggctacaaaggtagaagaaccgaagaagacagcagctgagaccgcaaagaaaagaaaaccaagaacaaagacagcgaagaaggcagcaaaggaagagcttaagcctgaagtgtatatccagtatcagggacgtgaaggcgtggtagaggatgccattaagaaagtgacagagcagtttgtggcagaaggtcacagagcatccacgatcaaatcacttcagctctacttaaagccggaagagaacgcagcgtattatgtgatcaatcagaaaattgctggcagagtagacttgttttaatacataggcataataaagggactgacgcttttggcgggcagtccctttttggattctgtttagttctgctctgctttgtactttgcaaccagacgctggatgcggtcatacggatttaagagatcgctgatcgagctgtcgtgatttaacgtatcaatgatataagcaatgtatttgctcatgtcgcagttgatataatatggctttgcaagcagttccggtgtctgataggtcaggttcgtggttacgaccttgtagattgtgccgtctgcaaccgcctcgtcaaaacgctccaggccgttggtgaacagaccgaaggttgcaacaacgaagatacggtttgcctttctcttctttaactcggtagcaacatcaatcatactctcaccggaggagatcatatcgtcgatgataatcacatccttaccctcgacggaggaacctaagaactcatgtgcaacgatcgggttgcggccgtctacgatcttgctgtagtcgcggcgcttgtagaacatacccatatccagaccgagcacgttggcaagatatacggcgcggttggtaccaccctcatccgggctgataatcatcatgtgctctgcatcgatctttaagtctttgacttctcttaagatacccttgatgaactgataagcaggctgtacagtctcgaatcccttgagcggaatggcgttctgtacacgtgggtcatgcgcgtcaaaagtgatgatgttgtcgacacccatagcggtgagctcctgtaaggcaagtgcgcagtctaaggattcgcgggcggtgcgcttgtgctgacggctctcatataagaacgggatgatcgcggtaatacgtcttgcttttccgccgacagcagcaatgatacgcttcaaatctgcatagtggtcatccggagacatgtgattctcgtaaccgcatacagagtaggtgaggctgtaattggtaacgtcgaccatcagatacaggtcatagccgcggacagactctttgatgacaccctttgcttcgccggttccgaaacgcggcactgcagttgagatgatataagaatctctgcgatagcccttgaacgcagggtcgttctggtgctggtgctgtctcttttcgcgccagccgacaaggtactggtctaccttaagaccgagttctttgcagctttccagtgggatgagacccaatgctccgtcaggcatggtttctaagtttctttcatcgtttggcatgaatggttcctccattaaagaatagttacataggttttattttcaatagattgctctaatgaaatacagggataaaaatgttaacggtgacgctttaagatacggatgtccgcgccgaagagctttaataatgtataattgctggatattctggataaaacgcgctctgaataaatatcggcaagctggttcatcccgaggtttgtggagatgatcgtggatttctgccgcagaatgcgttcgttgatacataaaaataactgcgaggtcgtaaaggaattggatagttccgtgccgagatcatcaatgatcagcagatcgcagtcgaaaatattccggtgggaaagcagtgcctcctcgtcccgtttgaacacgcccttgcttaatatatcaaataattggaatgcggtaaagtaaatgacggaatgaccgcggtctaacagctccttggcaatacagttggacaaaaaggtcttaccgatgccggtatctccgtagaggtaaagattggagaaggtgctgtcgaaatgatcgataaaatcgtggcattttgcgacggcatcctttgctgtctcaagggacgagcgtccggttgccggattgatgtcatccgcagaatagtaatcaaaggaaaacgtggaaaaattctcacgttccagaatctcttttaagttggactgggtatagaccagattgatggctgcctgttcaaaacagtgacagcgtctgccgttcacataaccggtatccctgcagtccgggcagtggtacaccggcttcagataatcagaagcaagcccgtgctcctgcaacagctgctccttctgcctgcggtagtccgagagcttttcacggagcgtggccagagcggccgcatctccgtctaacagccggcgtgcctgctcgacagaacaggtagcgatcgcgtcatcgatctctttaagtgccggaatccgggcgtagacgtcctttgtgcggcgttcgagctggtgctggctggctaactgtttttcgtcatatttgcggaatatctcgtcatactgtgaattgcttagcggcatctgtttcccctttaaatcagtgtacgttcgtggtcaaaagcatctgctccagttcgtcgtagtcgtaggagcgctgcgtgaaattgttgaacttgtttttggatgctgtattggcggcagcggaagcggaactttttttgcgttcctggtgcgccgcatccagttttgcaatgtcggacagatggtgaacctgctttttgttccagtcggaaagaatggaatccgtgtatttgaagttcggctgatgcagacttgccatggtgcgcttacatgcctcgaggatgatgtcggagtcaaaaccgtactcgttcgtccagcggctgatataggcgatctcggcggaaaccagcttgcgtccggtaatgccgaacgcgttcatcacggcgtagtacattttgccaagaaccggagaaccctgcttggcctcctcgacggtcgtgatatgctgatctgcccagccaagtgcgactttttctatgtatcggatgctggtgtgattgttgctcacacagctctcaatcaggtatacgatcagctcggtggaaaatccgagcacatcataaaaatagagaagcgtattgatgtcggtggtgcttaaggtgcggccgagataacgctctgcgatgaagaacagctctgcgacggattcattctggcggaaattcaaaatatcgtccgcggaatagctctttttggcaggaactgtctgcgccggtgccggtgtttctgccaaagcggcggaagcaggggcgttctgtgccggtgcgccggctggctctgtctgtgttccggaagtccccggatcagacggggcggcatctctggacgaagaatccagcatgcggataccggtcagattcttatcattgtcatattcaagctgcagcagatgcatgcgctcccaataggcaagggcacgcttgacatccttctccgtgtgctcgaacttgtccgcgatggaagaaatggaaaaagacgcctgcggtgcattcataaggcgcagcaagtagaggtaaatcttgacgaattccccgttggcatcagacatatattcatcgataaacgtgttggaaacactggttgcagagactggactgtcactgtgtagcttaatattggccattgaaaccgactcctctttctcaaacgtaacaagcgaaatgtacggcagccgccgacattccctgatgcattatagcacaggaaaactggaatgagaagtatcttttccggaacacatccggcacagacaatcgaccgcagaaatgtggataatgtggataaagaaaacgaatccggtggaaaccggattatggaaacgaaaggtttggcgcaaaagacggcaaaggcggcaaaagtgcaggaaacgtgtataaggattatgtaaacaaaaaaatccacattcaaaagttgaagttttccccaattgaatgtggataaagtggataacttatttgccgagaagatgttcaccaacatttacaatgtctccggcgcccatagttatcaacaagtctccgtttacacaattttttaataaaaatttttcgatctcctcaaatgacggaaaataatagcattccgtgccgcgtttcctgagcttggagaggatatcgcgggaggagacgccgtaggtatttttctctctggcggcgtagatgtcggcaaggacaaccacatcagcgagggagagcacatcggcaaaatcctctaaaaatgccttggtgcgcgagtaggtgtgcggctggaagcagagaaccagccgtttgtgtggatagttctttgcggcggtcaacgttgcgcggatctccgtcgggtgatgcgcatagtcatcgatgatggtgacgccgtccacgcagcctttgtactggaaacgccggtcggcaccaccgaaatcggataatccctttgcgaccgcgtcagcggcaagaccaagatcatctgccatcgcaatggcggccagggcgttggatacgttgtgcatgcccggaacgtgaagcgtgactttcatcagagcttcctgccctttcatggcggtgaagctcgcacaggctttctcgtcaaacgtgatgtctgccggatggaatgtgcagctgtcactgagaccgaaggtaattacctgcggctttaatccggcggtaatttcggtataatccggaatatcgccgtttatgatgatcgcgccatcctcccgggtgttggatgcaaattggtggaatgaatggcggatgtcctgaatatctttaaagaagtcgagatgttctgcttcgatattcagaatgatgctgtatttcggataaaaatgcaggaaactgttcgtgtattcgcacgcttccgacaggaagaaatcggacttgcctacccgcaggttgccgtcgagcacttttaaaataccgccgaccgtgatggtcgggtcgcacttggctgcaagaaggatctggctgatcatggaagtcgtggtcgtcttgccgtgggtgcctgccaccgcgatggagttgcggtaattgtccatgatctgtccgagcagctctgcgcgcggcatcatcggaattcctttttcgcgcgcacaggcgaattccggattgtcctcgtggatggcagcggtgtagacgacaagatcaatatcatccgtgatgtttgcggctgtctgaccgtagtaaactttgatgccgagatgctctaagtgtctggtcagatcagattcctttgcgtcggatccggataccgtaaaatgctcttcggagagaatctcggcaagcccgctcatgctgatgccgccgatcccgataaaatggatatgtatgggttctttaaaattgattttatacattataattctacctgcctgtttttctttctatgataaagttcattataaccttatcttactgatttgcaaattcttttgggataaaatattttcgacagaaagtgaaagaggagtgtagaaaaagaaaagatttgacgaaaatgtcaaaaaaaagaaaaatctgctggcaaatttgtgaaaaatgatgtacatgggtggacgattatgttataattataagtgcaaagaggaatagactgactagaaagacgagaggtgattgacgtgattcgaaaagaaatgatagccatgctattagctggaggccagggcagccgcctgggagtgcttacagcgaaggttgccaaacctgcagttgcgttcggaggaaagtaccgcattatcgatttccctctgagtaactgcatcaattccggaattgatacggtcggagttctgacccagtatcagccattgcgtctgaatacccatatcggaatcggtattccgtgggatctggaccgtaacagcgggggagtgacggtgttaccgccttatgagaagagcaataacagcgagtggtattccggaacggcaaacgcaatattccagaatatgaattatatggagcagtatcatccggaatatgtgctgatcttatccggcgaccatatttataagatggattatgaggttatgcttgatttccataaggagaatcatgcggatgtgacgattgccacgatgccggtgccgattgaggaggcaagccgttttggtatcgtgatcgcagataagaacaagaagatcatggattttgaagagaagccggaaaagccgcgcagcaatctggcgtccatgggtatctatattttcagctgggataccttaaaagaagcgctctacgccatgaaggaccagagcggatgtgattttggcaagcatatcatcccgtattgccacgagaatggaaaacgtctctttgcatatgagtacaacggctactggaaggatgtcggtacactcggctcctactgggaagcaaatatggagctgatcgacctgattccggagttcaatctgtacgaggaatactggaagatctacacaaagagtgatattatcgagccacagtatctctccgcggattccgttgtggagaagagcatcatcggtgagggaaccgaggtatatggcgaggtacataattccgtgatcggagccggcgtcacgatcggcaggggggcagtgatccgggattccattgtaatgaaaggaacaacgattggcgagaatgccatcatcgataaatcaattatagcagagaactgccaggtgggagcgaataccgagcttggcattggagaagaggcaccgaataagctcaatgcgagcatctattcctttggtctggtgacggtcggagaagacagtgtgataccggacggtgttaagataggaaagaacacggcaatttccggtacgacggacaaggaagattacccgaacggaattcttgagagcggtgaagtaatcattaaggcaggtgactcggtatgaaggcaataggaattattttagctggtggtaataacagccgtatgcaggaattatccaacaagagggcgattgcggcaatgccgatcggcggaagctatcgaagcattgatttcgcactcagcaacatgagcaactcccatgtgcagaccgttgcggttctgacgcagtacagtgcgagatcgttaaacgagcatctgagctcctccaagtggtgggatttcgggcgtaaacagggcggattgtttgtattcaatcctacagtaaccgtggataacagctggtggtaccgcggaacagcggatgccatgtatcagaatatcaattttttgaagaagcgccacgagccgtatgtcattatcacgagcggtgactgcatttacaagctggattataataaggtgcttgattatcacattgagaagaaggcagacatcacggtggtatgcaaggatatggcaccgggagaggatgtcagcagatacggcgtggttcggatgaatgaagattccaagattgtagagttcgaggaaaaaccgatggtatccaagtcgaacacggtatcgaccggaatctatatcgtgcgcagaagacagctcattgagatgttagagcgcagcgcagcggaagaacgctgggattttgtgacggatattctgatccgctataagaatatgaaacagatctatggttataagatgaaggaatactggagcaatattgcgaccgtagaatcctactatcagacgaacatggatttcttaaaaccggaggtgcggaaatactttttccatgatgagccgaagatttactctaaagtggatgatctcccgcctgcaaaatacaatatcggttccgatgtgcgcaacagtttaatcgccagcggatgcatcgtcaacagcaaggtggagaattcgatcctgttcaagaaggtatttgtcgggaagaattgtgtgattaagaactccatcattctgaatgatgtttacatcggcgacaacacacacattgagaactgcattgttgagagccgtgatacactcaaggcgaacacctattattgtggtgacaacggtatcaagattgtatccgagaacaacgaaaggtatgtactgtagagaagggactaaagggggacagaatctatgcagattacggacgtgagaatcagaaaagtcgagaaggaaggcaagatgaaagcggtggtgtccatcactatcgatgaggaattcgtggtacacgacatcaaggtgatcgagggagacaagggattgttcatcgcaatgccgagcagaaaggccgcggacggggaataccgcgacatcgctcatccgatcaattcggacacaagagagcggatacagactctgatccttcagaaataccaggagacaatggctgctgaggaataagaccgggagaaagccggatggcagtttacccagggaaataaatgcgcacaggttttacgggaaggtaaagcctgtgcgcatttgtttatacgtgcagggatcgggcagtggtgcagaaaactcttgtaaaatctgcaaactaaggtaaaatgaaacgtgaactgtgacaagatcaaacaaaagacagcaggaatcgtcaattacaatagatggcaggaggagtatgatgagtcagttaaaagcagtgatacttgcagcgggaaaaggcacacgaatgaagtcggatctgccgaaggtggttcataccatagagggaaaatgtctggtggattatgcgattgaggcggcagaaggagccggcgccggtgagatctgccttgtggtcggctacaaatacgagatcgtgcgggagaccatttcacacaaggacgtaaagtttgtattacaggagcagcagctgggaaccggtcatgcggtgcggtgtgcaaaggattttctcggggaggaaggacagacactgatcctgtttggagataccccccttatcacggcagagaccttaaaaaaattaagggagcatcacattgcgagtggaaatacagtgacagtgctctcagcaatggtcgaggatccgaccggatacggcagaattatccgagatgcagacggcaattttgtgaagagcgtggagcacaaggatgcgacggaggcggaactggcatcccacgagatcaactcaggtatgtatatttttgatacgaaggagctgcgtgaggcgttggatctgattcagccgaataacgcgcagggtgaatactatctgccggatacgctcacaattattaaggaaaagggactgaaggtggatgcgtatgcgctggatgacccggaggatatcacaggggtcaacgatcaggagcagcttgcggctgcagcagtcgtgatccggcggagaatcgcaggcaacaaagcaaagaacaggagatagcgatgtttttgatcgtaggtctggggaatccgggcaggcagtatgagcatacacgccataatgcgggatttgatgtcatggatgcccttgcggaaaaatataatatcagtatcagcgaaagcggacacaaggcgcttttcggcaaagggatgatcggcggacagaaggtgattctggcaaaaccgcagacatttatgaacttaagcggcgagagcgtggcggaacttttacattattataagattgatcccgaggaggagcttctcgtcatttttgacgacatcagcctggcgccggggaacatccgtatccgcaaaaaagggagcgccggcgggcataatggaatcaagaacattattgcaatgaccgggacggagaactttaagcggattaaggtgggcgtcggcgaaaagccggcgggatgggatctggcggatcatgtgctcggacgcatgagtgaggaagaccgcgcggcatttgaggaagcggtgaaggaatccgtaaaggctgcggagatgatcctggaggatgagattgatcaggcaatgaatgattttaacaggaaaaagcgggagagtcagtcatgaagacattcacacagcccatgcaggggctgaaggaatttgaggacctggaggcggcactgccgaagttatccggcgttattcagatttccggctgtatcgatgcagccaaaccacatatgatgtacagcattggcaatggttctggaaacagaatcattgttacgtttcaggaacaaaaagcgaaggaactggcggaggaataccgcttttttgatccgaacgttgcctattatccggcaaaggatattctgttctaccagtcggatatccggggaaatgtgctgacagcggagcgtatcaatgccctcaagatgatggcggaagagcgctcgtgcacgattgtaacgacgtttgacggactgatgaatccgatgccgtcgccggatcagtttatcagtgcggtgcggaaagtggcggtcggggatgtgattgatctggagcagcttacaaggcacctggcggaactgggctacgagaagaattatcaggtgcaggcaagcggtgaattctccgtgcgcggcggaatcattgacattttcccgctgacggaggagaatccgttccggattgaactgtgggatgatgaggtcgattcaatccgctcattcgatgcggaaagccagcggtcgatcgagaatctggacgaggtccacatctatccggcgtgcgaactggtgctgaccaaagaggagcgtgacgccggtattgcgcgcattctggcggaagcaaagcaggtttcggaaaagctccgcggggagatgaagaccgaggaggcgtaccgcgtcaagtctgcggcggaccaggtggcggaggaagccggggagctggggctctctgccgggctggacgcctacctgtcctatttttgcgaggaacgagtctctttgctcgattattttggaaaacaggatacgctggtgttcctggatgaaacaccgcggagcattgagcgaggaatggcgacggagaccgaattttcggagagcatgaagcagcgcctggaaaaagggtatatactgccggggcagatgcgggaactttttacctgcaaggagattctgggaaaacttgcggggcgcagatgcatctcgctggtggcgctcgaccttaaaaatccgcatctggagatcggaacacgtctgaatatccagtctaagacagtcaatccgtacaacaacagctttgaacttctgataaaggatctggagcgctacaaaaagaatggatatcaagtgattctgctgtcgggatcgagaacgcgcgcgaagcgtctggcagatgatctgatggcggaagggctgaacgctttttattcggaagactacgatcacgaggtaaagcccggcgagatcatgacgggttacggcaagatcaaaaaaggatatgagtatccaatgctgaagtttgttgtgatctccgagagcgatattttcggcggcgagaagaagaaaaagaagcgcaagcgcatctatgagggagagaagattgcaagctttacggatctgaacatcggtgactacgtggtgcatgagagccatggactgggcatctaccgcggtattgagaagatcgaggtggataagaccgagaaggattacatcaagatcgagtatgcaggcgggggcaatctctacattctggcgacgcagctggagcagatccagaaatatgcaggcgcgggggcgaaaaagccgaagttaaacaagcttggcggacaggagtggaacaagaccaagtcgagggtcaagggagcggtcagggagatcgccgaagacctcgtgaagctttacgcagtgcgccagaatgaccggggatttgcgttcggaccggacaccgtgtggcagaaggagttcgaggagatgttcccgtttgaggagacggaagaccaggatcttgccatcgcagcgaccaaggccgacatggagagcacgaagattatggatcgtctgatctgcggcgacgtcggatacggaaagacggaaattgcgatccgtgcggcgtttaaggcggtgcaggatggcaagcaggtggcatttctggtgccgacgacgatcctcgcccagcagcattacaacaactttgtgcagcgcatgaaagattttccagtcaacattgatctgctctgccggttcagaagtagcgcggaacagaaaaagacgatcgaaaagctgaaaaaggggcaggtggacatcatcatcggcacgcaccggctgctgtccaaagatgtggtctacaaggatctgggacttttaatcatcgacgaggagcagcgcttcggcgtggcgcacaaggagaaaatcaagcagcttaagaccaacatcgatgttctcacactgaccgcgacgccgattccgcggacgctgcacatgagcctcatcggcatccgggatatgagcgtgctggaagagccgccgatggaccgtgtgcccatccagacatatgtgatggagtacaatgaggaactggtgcgggaggcaatctccagggaactggcgcgcggcgggcaggcgtattttgtatacaacagagtgcgcgagatcgccgatgttgcgacgaagattgcggagcttgtgccggaggcgaacgtggcatatgcgcacggacagatgaaggagaccgaactggaaaatatcatgtaccggtttatcaacggcgagatcgatgtgcttgtatccacgacgatcattgagacgggactggatatttcaaacgtgaatacgatgattatccacgatgcggacaatatgggtctttcccagctgtatcagctccgcgggcgtgtgggcagatcgaaccgcacggcgtatgcgtttttgatgtataagcgggataagatgttaaaggaggtcgcggagaagcggcttgccgcaatcaaagagtacacggagcttggaagtggctttaagattgccatgcgtgatctcgaaatccgcggagcgggcagcctgctcggtgagcggcagcacggtcacatggaagcggttggttatgatctgtactgcaagatgctaaacgaggcggtcaaggaagcgaagggcatcgcggtggaggaaagctttgacacgtcgatcgatattgtgatcgacgcctatatcccgatggggtatattccaaatgaactgcagaagctggacatctacaaacgcatcgcagacattgagacgcaggaggagacggaggagatgacggaggaactgatcgaccgtttcggagatccgccgaagtccgtggaaaatctgctttacattgcaaaaatcaaatcgatggcgcaccggctttattttacggaagtggcgcagaagggtgagagtgtccgttttactctctatgagaaagcacggattgatgtgacgaagattccggaactggtggcggcatacggtcagaaggtgacgtttaccgctgatccgaagaatccgtacttcacatatcacctgaaaaagaattcgagggacaagaatgtggacatcaaatcggtggtggagcagttcctagccgacgcaggaggatttctggcggagcgggaagcaccaaaggaagggtaaaaaggtgtagaaagccaattttcgggcaccggtggaccggctctccggcgtcggaaaagcttgaaaaaagtatgaaaaatattgcgacccggagaaaattgcactataatagagcaagactgccatggcaagctgtcatggcatataccaggaggaacctatgagagcaaagagatggagcgcactgcttcttagcggtgttatggcagcatccatgttaacaggatgtggaatgaataaaaatgagacagtggcaacttttgatgagacggaagtgccgcttggagtagcaaattttgcagcgagatttctgcaggcaacatatgatgatttttatgtggcatattttggcgaggacgtatggtcatccgatctgtacaacaacggcaccacgatgcaggacaatatcaaggacagcgtgatgcagtcactgttcgatatgtatacactggaagcgcacatggcagagtacgatgtggagctgacggaggatgacaaggcggagatcgcagacacagcggctgcgtttattgcagacaacagcaaggacgcgctggatgcactcggtgcggacgaggagatcgtggagcgttatctgacgttggcgacgatccagaaccggatgcacacggcgatcattgcggatgccgataccaatgtgacggatgaggaagccaacacaagctcctacagctatgtcaaggtgtccaagcagtcccatacggatgaggatggcaataccgtggagtacaccgacaccgagcttactctgcttggcaagaccgtcggcatgtttgacacggacgcgaaggcaggcacactggaggatgcggcagagcagtatgactatacggtgagcagcggaacgtttaccgcggatgacagcacacttgatgaggcagttcttaccgcgttgcagggactggacgaaggggaggtgtcgggtgtcatcgacacagataccgattactatgtagttcgtctggatgagaagacggatgcggatgcaactgagacgaccagacagaacattatcagccagcgccagagcgatctgtacgacgagacgctcaaaggctgggaagatgagcacgactggaccgtgaaggattccgtgtgggcgaaggtaacatttgacaacctgtttaccacaacggtggaggatacggagactgagaccgtcacggagagtgcgacggaatagaagaaaagctgcggcaatgacagatattgcggcaggagacagcgaattattggaacgttgtgctggtcaaacagtgtaacgcgagcgttccagcgaaaacaggcgggaggattctgatcacaaaatacggaatttctaactccgccgcttttgccagctgtgatgatctgtgtctttccaagttttgaacactccggaggcgtgtccgcaagccgtagacaatttaaggacttttgtgagtgccccttgttggcaccgctaaacaaaacataaccgcgcgaagccaatgtttgaattggcatctgccctgttttcaatagcagatgccaacgagtttcggttcgcgcggttttatattgtctgtgaagcggtgccgctaggggcaccagaaagtccgctcattgtctgcggcttgtcggacacatcctcgcggagtgtcaaaacgtggccaagacacggaaggaactggcaaaaacggcagagaagaaattctcgcattttgttccaaagaatcctcccgcctgtttttcgctggaacgttcgcgttatgccctttaacgagcaacagcgatccgacgatctgctgtctcctgctgcatgtctgtcattatcgcagcttttcgttctttacgagcatctcttcaatgacgccctggcagtgggcaccgattttcttcttcgtctctttatccagctcgttcggatagatcggcttgccgtactctaagatgacgtgtgttgccgttaccttcggaaaatgattctctaaaatatcggcggaaccggtgattgccatagggacgatcgcacagccggtcttttctgccatcttgaaacttccctccttaaaaggaagcatcagatcgtcagttttgttgcgtgttccctccgggaaaatgcacatcgagatgccgttcttgatgtgatcgatgccggcaagaatggtctttaaggcttccttgacgtcatcacggttgatgaacaggcagtagagacgcttcatccacagggaaagaagcggaacttttgccatgtcattcttggcgacgtagccggtcagacccgggcatctggcataggtgatgataatgtcgaagtagcttttgtgattgccgatatacagaacggcttcgtcctttggtacattttcttcaccgataacggtgactttggttccgcagatgaacagaatgacgcgaaacgcccactgcaccatgcgcagctggctgatgtcggcagccttacggttgaacttgctgatgatccattcgattccgagaacgggaattccgatgatcagatatagaatggcaaacagcagagcaaggatggctcgtaacataagaagatcctttccgggcaagcgccccgtagatttttacatagtttttattataaagcctgaaaagaggaaacacaagacgcggaaaagagaattcgcaggcatatttaaaaaagatgcggcatatactttggatagaaccgaaaatttgggggactgtcagatgttttggtatgggaagagatggaagaaggggtgtctggtctttttggcagcggcggccctgcttgctgccgggtgcagcattgagacgacaaacggagcgaaggttgccgatcttgactatgagatcgtggaggaggcgcagataccggagaaagtgaaggctgtgatagaggaaaaaaaggcggctgattttaaaacgacctatgaactcgacggggatctgtacatagtgcgcgggtatggagaacaggagacgggaggttacagcatctgcatccgggatctgtatctgacgtcgaatgcgattttgttcgatacggaacttgtgggaccgagaaagggagaacaggtaagcagcggaccgagttatccttatattgtaataaagaccgaaaaacgtgacgaaagtaccatatttgagtgaattttcttgatatttttaaaaaattctccggtttgtttgacaaaaatttagtacagtgataaactaaagcggaatggtattcggtgttaggacgataagaagccggaacagggaggtagacaatgcaacaggcagacatccataaggtacgcgcttccgtgtatcagcagtgcggacggaaggtactgattcagcttgacagaggacgcaacaaggtcgacatccaggaaggagtcattcagaacgcatatccgagtgtttttacaatactggtgaatgacgagcaggaagaaaatccgcctcagttactttcattcagttattcggatatcattacaagagatattcggatgaaattatgttaacataaggtatcaggtataatattccccgtattcgaataagatgtttcaaagattcggatatgggggatatttttttggaactcgaaaaagtaaagatacatagaatacagcagaatggcacggcggtcagccagatcacgctggatgatgactataatgtcccggactaccggccggacatcatgaaggttttgaaagaaaatggcgaactgcggtttgacgaggtgaaggcggcaaacaaggcggtgtgggtaaaaggaagcctggtgtttcacatcctttaccagtgtgagcagagcgatggaaaaatcagctgcctcaaaggagagattccgtttcaggagaaactcaatatagacgggctgcaggagaacggggaggtacatgccgccggagagatcgaggatctgacagtcggcgtaatcaattcgagaaaattgagcatccgtgcggtggttgtgctgcgtgcctcggcggaggaacaggtgttggaggagtttacgtccagactggaactgccgggggattaccagcagaagacgggaacctggggagcgctcaatctgctcgcatcctgccgggatgtctgccggcagaagagtgagattgttctgccgtcgaacaaacccaatgtgcgggaaattctgtggcgcagtgtagaactccgcaacgtcgaaagccatgtggaggatgggaaggcggtcgtcacaggtgagattctggcggcggtgctctacagcgaggaagaggagagcgagcgcctgcagtggtatgagacgacggttcctctggaatgtgcggcagactgtgacgctgccggggagaattgcatttttaaaatatcggctgtcccgctgtcggcggaactggagatcaagccggattacgacggggaggagcgcattcttgtgctcgaactctccgtctcggtcgatgtccgcgtgtggcgggaagaagagatggaacttctgaccgatctctactcgctccgggaaaaagccgttccggtagtcagggagcggatcggtgagagactccttgtaaaaaatgcggcaaaatgccgggtaacggaacagctggaaattccggaaagccaggagaaaatcctgcagatctgtgcctgcgagggaacggtgcgcctggaaaaatacgagcctgtggagaacggaatccgggcggagggaacgatcacggcggaacttctctatatcacaacggatgacaatatgccgatccagtcggcaagggaaatctatccgttttcccagatccttgagattcccgatatgcagccggacgtggaggcggagatggactgcggattagagcagctgtccgcggtgatgatggatcaggaacatattgagatcaaagcggtgatccagttaaacctgatggcgtttttgccgcagaaaatacagaacatcgaagagattacagaagagcctttagatatggaagaattacagaaccgccccggtctggtgggctatattgcaaaggcgggcgatgatctgtggacgattgccaaggagaatcatacgaccatacaggatattctggaaaccaacggctggacggaaaaaaatctgcagccgggagatgcggtgctgatcgtcaaacagataggataaaggtactatttgcacagatttgcttgagtaatagaagacgctctgttatactaaagtggtaatgagtgttattttttgaaaggaattttgaaaacagggagacaaaagatggatcagaatgagaacaaaaattacaattttgagaacgacccgggacagacacagccgggatctgcgggggcagagaatcagcagggaacgcaggatgtgtacggtcagcagggagcacagggtgcatacggtcagccggacgtggcagcgaatagcggaatgacgcagccggacggccagccgggagcgaatgcttacggccagccgggaaacggttatggacaggaaagcgcaggtcagccttatggacaggagaatgcaggccagccttacggtcagaactacggtcaggcagaaaatgcgaacggccaggggaatgtgagccagccttacggtcagcagaattacggagagcagagcacgaacggccagggagagtattcttacggacagaataacgcctatggacagaataacgcctatggacagaataacgcttacggacagaataatgcctatggacagcagacgaacggtcagcaggcgtatggtcaggcgaacggccagtatgcgggaaatgcatatgctggcgtaaactatggcgaggcgacggtgctcaacgacgagaacggtcagccagtgaagaactcgttcggaatgaagattacattctccatccttgagattctgtgctgctgcggatgcaacctgattaccatgattatgggtattatcggatgcgtattcacgagcaaggcgaacagtgcctacaagtccggagatgtgcaggaatataagcgcaacagcaagtcggcgacaatctgcctgtggatcggttttgcgatcgcactggtatggctggtcttcagcattattttcagcgtactttacagcaacgacatcgaggatgcgtttatggaaggatataacgaggccgcaggtgtaagcgatgattacgacacggatgatttcatgggtgattccggtgatgaagagtacgacaccgacgattttcttgccgatgacagcgaggatacagaggatgccaaaacggtagctccgcttgacgtgacagcaggggatgcgttcgacagcggagacattaccgtcaacggtatcctggtgcagcttccgatgagctacagcgatttcaaggcactcggtttttccatcgactccgaggatgaggagtatgtatccaacaagaatgaatattactatccgacattctacgatgcacagggaaatgagctgggagaggtgtacattggaaatgtaaccgacgatccgcagacacttgcagacggaacggtgttcggcttctcattcaccagcatggactacaatgacgatctggagatccttctgccgaacggtctgacaaaggatgcggtcaacgacgactttatgactgcttacggcgagccggattatgagtatgagtcggataccggcgactaccagtcttatcagtggtacagccacagcgacacctacgaggatatggatgaaaactccatttccgtaacattctatgatggcgagctgagcgatctggaactgatgtatatcggatgggattgatctgatttccgaaaaatcgaaaaattatggaaactgtgacaattttataaggaagtatgatataatcaacgggtatgataacagagtcatacccgttttttgtacgcaatgaaagataattcagatatttgggatggagataccgcatgagacattttaagaaacgtgttctggcactgcttctggcgggagcagtcggaatcggaaactatgcgtctgtgtctgcttcggcaatcaaggatgcacaggataaaaaggatgaggcacagcaggaactgaatcaggtgaaccagcagattcagaatatccagtcggcgcagaacagccttcaggcagagatgaataattatgacaatcaactcatgagcctgcttaccgatatggacatcctgcagagcgatatggatacgcaggagcaggagatcgaacaggcaaacgcggatctggaaaatgcgaaagcggaggaacagcagcagtatgacgccatgaagcagcggattcagtatatgtatgagaatggagaccagtcctttttgacggcgttagtcggcgcggacagcattacggatcttttgaaccgggtggaatatgtctcggacgtctaccagtatgatcgcgatatgctgacgaactatcaggaagtggtgcagcaggtggaagatctgacggcacagcttgagagtgagatggcggagatggaggagcttcagatcagctatcaggagcagcagagctctctggagcaggtgattgcgacaaagcgttcggagatggcggattttgacagccagcttgccaatgcacagagtcttgcaagccagtatgcgcagacgatcaagcagcagaaccagatcatcgcgacggagaaggcaaaacaggcggctgcggaggcggcgaagaaaaaggcggcgcaggcggctgctgcggcaggaacgaccggcagcaccaccggaacggatgcctcgacagccggcaccggaacgacctcgaatacgaccggaaataccgcttcgaccgggacggatacctcgacttcgggcagcagtacctccggcagctcttccacaggtctgacggacggcggactaaatccgtcctacacgaccggagtcagcggcagtgacgtcgtgtcctatgcgagccagtttctggggaatccctatgtccttggaggtaccagcctgacatccggaacggattgctcctattttgtcatggcggtctaccagcattttggcatttccctgccgcgatcttcctattcgcagagcggctgtggacaggcagtcagctatgaaaatgcacagcccggcgatattatctgctatccgggacatgtggcaatctatattggaggaggacggattatccatgcgtccaacccgagaaccggtatctgctacggaaatgcaacttaccgtacgatcacttcggttcggcgtgtgttgtaggtttgtattttcaaaagtaaaatgctataatctggatagaaatgaaataagagatggaggaatagaaaatgcagttcaaacagttacaggatgatatgatcgcagcaatgaaggcaagagacaaggtgcgcaaggatgcaatctccacactggtgtcggctgcgaagaaggtggcaatcgatgagggctgccgcgatgacattcgggaagaacttgtggaccgggtcattttaaaggagatcaagtccgtgaaggaacagatcgatacctgcccggcatccagagaagatctgcttgcagaatataagacgcgttacgatatttttatggaatatgcgccgaaaatgatgtcggctgacgaggtggaggcgtttatcacagagaagttcgcggacgtggtagcaagccacaacaaaggacagatcatgaaggctgttatgccggaactgaaaggcaaggcggagggcagcgtgatcaatcaggtggtagcaaagctttgtcaggcatgagacagaaattaagatttaccgctgttctggtcgttctgctcatcattctggggacagcatcctaccgcgaacagggaaagcggcagaagctgtcattcccggaatcgctggatcttgtggtggtggcagtggacggggagcaggtgactctgcgggagatgacattttatatcgcatatgaggaaggcagcatggaagatgcggccatcatctataatccggataatacggatgaatactggcagctgtatatcaatcatacgttcctgcgggagcaggcgaaacagacagtggtggatatgaccattcatgatacgctgttttaccagatggcaacagcagagaaaatcacgctctcagaggaggaggaacagtatcttgccaatgatcagcaggatttttggagtgaccttaccgaggaacagagagcgcgcctgggtgtcgatgaggaaacgattgatgcatccatgcgaaaaatggcgctggcgcagaaatatcagagtattcttgcggagatggaacaggtcgattacgaggattattccatcggcggcacggaatacgaaaaacttctggcacagcatacctgtgagttagacgagactacctgggaccgcgtgccgttcggcagcatcacggtagatcattgaacaaagagggaaagacagagattttccattgcgtgaagcaggatatgcgccgatatgtgaagaaagcatttgcggcaggcagaatataatataaaaaataaaatagagaagagaagaagaatatgtcagtaaaaattggaagaaatgatccgtgctggtgcaaaagcggccggaaatacaaggcatgccatcaggcatttgacgagaagattgcagcgatcgctgcgcagggacatatcgtcccgacccatgacattatcaagaatgcagatcagattgcagggattaaggagagctgcaagatcaatatcgcggtgctcgattatattcaggagcacattcatgagggcatgaacacggcggaaatcgacaagattgtctacgacatgacgaccagcatgggcggtattccggcaccgctgcattatcagggctacccgtacagcgtgtgcacttcggtgaacgatcaggtgtgccatggattcccgtcaaaggatgtcattttgaagtcgggagatattatcaatgtggatgtttccacgattttgaacggttatttttccgattcttccagaatgttctgcatcggcgacgtcagcccggagaagaaacgtctcgtggatgtcacgaaggagtgtgtggaaaaaggtctcgcagaggtaaaaccgtggggatttttaggcgatatggggcaggcggttcacgatcacgccttcgcaaacggttatacggttgtgcgtgagatcggcggacacggcgtgggactggagttccatgaggagccgtgggtcggctataatagcaagcgcggtcaggagatgctgatggtgccgggcatgatctttacgatcgagccgatggtcaacatgggaaaagtggacatctatgtcgatgatgcaaacgactgggaggtctacacggaggacggacttccgtctgcacagtgggagattatggtgcttgtgacggaggacggccacgaggttctttgctggtaagcaggaggcaggatgaaaaatctgggaaagaaagcggttcacggagcgccgggaaaagcagcttcgatgaagaaggcggatgtgccgggcgaatggctctattttgcaccggaggcagtgggtgtgcggcagattgcagatgcgctggaaggaacctgtgagatggaaatctggcaggaagcaggcgtacttgagattatgtacggcggagaagcctccatggacatggaggaaggaaaaatacatccccgggatcaggtgactgcggcatttgcagaggaacatgactgcgacagagtgtatctggtgacattttctgcggaggaatatgaaaaggtactgcctgtaatgcggcacatcttacaggaatgcggcggcatattctgcggcgatacggaagattttaagccgatacttacagagtagaaaagggatgcttttttgctttagtgtattgaaatgataagaaaaaacagctatgatactgttattggcgcagagaaaaaacggacgccggagcgggaggaaatatggacagcagaatttcaggacacacaggattattggcattgattggttcgccggtcggacattcgggttcaccggcaatgtataactacagtttcgagcgtctggggctggattacgtgtatgtggcttttgacatcaaagtggaggaagtggcagacgccattgccgccatgcgcacattcaaaatgcgcggctgcaatgtcaccatgccgtgcaagacagaggttgtcaaatacatggatgaattgtctccggcagcacagattatcggagcggtcaacacgatcgtaaatgacaacggcagactgaccggccatattactgacggcgagggatttgtgcataatctgaaggatcacgggatcgatattaagggcaagaagatcacggttgcaggcggaggcggtgccgctactgccattcaggtgcagtgcgcgcttgacggtgcaagagaaatctctattttcaatatcaaggatgctttttttgagagaacgctgaaaacggcggagaagatccgtgcggcggttccgtcgtgcgtggtaaatgtctatgatattgcggatactgcgcggatgactgcggagatcgcgtccagtgatatttttgcaaatgcgacgatcgttggcatgaagccgatggaaaatgagagtgtggtaaaggacacttctgcattccgaccggggttagtggtggcggatgccgtctacaacccggaggagacgagattgctccgggaggcgaaggaagccggagcaacctgtatcggcggcaagggaatgctgctgtggcagggcgtggctgcctttaaactgtataccggaaaagatatgccggtcgaggaagtcaaagagcgtttttttagctagaaaggtgaaactgcggcatgaagaatttatatctgatcggctttatgggcgccgggaaaagtaccattgcgagagcgcttgcgaaaaaatgtccgtcgaagcgaatcgagatggatcagctcatcgaggaacaacaggggatggcaatcacagatatttttgccgcacatggggagaattatttccgcgacctggagacagagttgttgcggtctttttcggagagcacaggatatgtggtatcctgcggcggaggcagtgtactcagggatgagaatgcggcgctgatgaaggagaacggttgtatcgtgttccttcgggcgacgccggagacgatctacgaaagagtcaaggacagtacgaaccgcccgattttaaacgggaatatgaatgtggaatatatccgggaactcatggagaagcgccggccgcgctacgaagcggtggcggatatctgcgtggacacggacggcaaggacgtggatgccatcagtgaggagatcctgaaagcggtagaaaacagagcataagaggggcagcaggagatgaattttgagtttataagggagtgcaggctggagtcggacgagcttcaggcgatgtatgacaatgttctgcaggaactggagcgcgcggagcattattattggagaaaaccgcaggagtgtggcatcattctgcgccagacaacagagcggatctgtcgtatctataatacatattatcaaatcggctatccagggaacgcttcgctggaagagtttttgtgttatacggacgaaaacgagcacaacgtgatggtgagccgttttttgagcgtcgtccgcaaggagcagcgcgaccggctgaataagctgcgtgtgctgggagatgactgtatctggggcgaggaggcaccggatcaggggatgacttttgaagaccgcatggggcagaacgcgagacatatgatggagaccatgatggaggtcaccaaggatatgtgtgagaagatcaacaagagaaacgacgtgttcgacgagttcttcctcgaggaggctctgccggagacaaaggaagaggcaggaaaagagacgcttgccgctgcggagataacaaccagtgcagagaatacgaaaaaacctctgtttgccagaattttccacaggtgaggacaaatgaaaaaatcagtatcgaccgtttatggagtgctgcttgtcatcggattcattctgatggctctgagctttgcgtttacaggtaaaaagaatacaagctttgcggaggattccagacgaatcgaactgcagcccgatcgcgtggtggaagtgagtgaagatgtcagggagtattatttcgacagtaatcagatgcagtcagagttttcggaactgacattttttagcgtacatcagtgcgtggaagtgtatgcggacggcgagcagatttattcgctggaaaagagcagtacggtgttcgggaggacgcccggaaccggatggaatacgatccagctgcaggagggcgtgaagagtttcagtgtgcggatcgaggcggtgtacccggcagtgcgggatcatgtgacgaggttctatcaggagaatgacggacagatggtctatcagacgatgagaggatcggttccggagatcatggtcagcacagtcgacggagcgatcggtattatgctgctcatttattatgcaattgcaagacgcaaagtaaagatgggaccgggcatcctgtattttggcatttttaccctgatgatgggaatgtggtccatgaatgaggcggagctggttgcctacatggtaaaaagccggacggcggcctcgtacaccggctatatgatgattatgctgatgattgcgccgtttgcagcatttttgcaggagttctccgaggtggaggagaagtatatatcaaatattatctgcatctgttcatttgcgaatgttgtagtgtgtaccgtactccacatgacggggatctgcgagtttaaaaatacggtattttgcacgcattttctgatggcatgtgacctgctctatctgctctatgtgatcttgcagcgttaccgggcgcgcggaatggaccggcgggtgcgtgtctgtatctggggacttgtaattctgctagtgtcttacgcggtcgacatgtcggcgtactacatcggatggagaagaacggatgtgatcggcagatttggattcctgttgtttatctgcctgctggcgagagaggcgactgcggtgtcgatggagaagattgatgagggacgcaaggcggagatctaccgggaactggcggagcatgatatgccgaccggactgtacaaccgcaacgcttatgatgagtgggcgtcggaaaatgccagagaccgagagacggcgatcgtgacgttcgatttgaatgatctgaagtactgcaatgacacgttcggacatgcggcgggcgataagtatattcaggacgcggcaaagctgatcgcggaagtgtttgaacctgccggggtgtgctaccggatcggcggggatgaattctgcgccgtgatccgccatgccagaagtgagtgggtcgaggaacgtctgcgcagactggaatatctcgagtggaaatataatgaggggaaaatggacgtcccgatgcggatcgcttacggctacgcgatctttgacgagcagtatgataaaaatatggaagagacaagaaaccgtgcggatgtgaagatgtacgagaaaaaaagagcgatcaaggcggaagagagaaaatgaaaaaatgcgggaattcccgcattttttctgctgtagtcagaagttgcttccgctccagccccagttatcggtcgggaagtatgccacgtagatgtggtctgcaggaatggaaagttcaccggagagcagatggcagagctttccggtcatctggctggtgcctgcagcggacggcgtgccgaaggttttgacctccacataggcgacagcggtagaatccccctgaaaggacaggctggcattgtcctcaaacccggtcatgacccagttctcccctttgccgagacattctctggtaatgcggcagatctctgcggtcagggaatcctttttggatttgctcagggaaacggtggttttcgtattgataaatggcatggcaatatcctcctttacatctgataaagatagtatatacgaaaataagcctgcatacaatgtaaaaacaagtattgcaggggatttcgtttgaaaggttatattgaggaaagagccatggagattgccagatatatcattgacaataacacgaccgtgcggcaggcagcaaagcatttcgggatcagcaagagtacggtacataaggacgtcacagagcgcctcgtgcagatcaacccgtcgctcgcggcggagacgcgcaaggtgctggacgtcaacaagtccgagcggcacatccgcggcgggatggcgacaaaggagaagtatctgcatcagcatgtgtaaaaccgcagaaacatttgacggcatgaaaacgtttttatataataggagaagataacggcaggatagatggaggataagcgcagatgaagaagatagcgttgatcatggacggatggaagcgattcttcacatatgcatggcccgccggaatgttggagcgtatcagagagacgaatgaggatgtgaatctgtatattttcaacagttcgggagactggagcagggatgaggattacaatatcggagagtacaacatctatcggctgccggacttaaacgatttcgacggcattattgtagatctgaacaatatccgctattccgaggtgcgggagtatgtgatctcctcggcaaaggccaccgggaagccggtgatttccattgcaaatgagattgcggatttttactatgtcggtattgacaactattccgccatgcaggaaatagcggcgcatctctatgaggtgcataattgcagacgcttctggtatgtcatgggaccggacgataattacgagagcaaccggcgtgtggctgcgttgcgcgatttttcagagacacacgggattttgtgggatgccagggatctctactgcgagagttatgaatacaagtgtggagtgcatggatttgaaaaattgctcacgctgcacgggaaacttccggatgccattatctgtgccaacgataacattgccgtcggcgtgtgtgagaccgcggaagctcacggctacaaggcacccgacgattttctggtgaccggattcgataattttgacaaggcgagctattattcaccgcacatcacaacggtcggacatatccgcgagcaggtgggataccactgtgcggatattcttctgcggctgtggaggggcgagatggtaccgcggtttaattatacggggcaccagtgcattttctgggaaagctgcggctgcgacgccggcattgcggtggatcaggcagaacattccagggcgcagattgtctatggaatcgagacggacgaatttgaggagcaggtgctttcgctggagtatgaattgttgcagtgcgagacggtgcgtgagatgtcgcgctggattccgaaatgtattccggctatgcggtgtgacgcgatgtatctgatcatggatgagcacatgaatgatttccgggaattgagcgattattatgacagacatctgattgaggatgaagagttctgcgtgcacggttatccggagaaaatgcagatggagttcgcctatgaggacggtgtggtaaaagagagcgaggagacggtcgtggaggggattttcccgacctttgattacgcggagggcggaaaagattttctgtttctgccgcttcatttccgggaacacacggtgggatattttgtcatccggaatgctgtgtatctgatggagaagcagtatttgttccagattatcaacgtgttgacgtctgcgatggagaatctgcataaaaaggagcgccttgcctatctgaatcaggtgctgtcagaactgtacgtgaaggatgccatgacgggaatgtacaatcggctcggttaccagaagctggcgtgccgtatgtttgagaaaaagaagcagacgggggagaacctttcgattatttttatggatatggacaggctcaaaagcatcaacgatgaattcgggcatatctatggggactgggcgatcaagacgattgcgtcggcgattttaaaatatattccggagggagcggtcgcggtccggagcggcggggatgagttccttgttgtgctggagcagaccgcggatgcagagatcgagaagatcatcggagagatccgggaggatatccgggaacgttcggcggagatgaaactgccatttccgctgacggtcagtgcgggatgtgtccacacagatatgacgactgggtgcgatctggacgactacgtgcgcgaggcggatgccatcatgtacgaggagaagaccgcgaaaaaagcgaaccgcacctaagcaggatgaaaaggcttccaaccgggcaggggaaaagaataagaaagtcagaaggagataccggcagatgaaaatcgagcgtgaacgggtcagagaaacattccgggagtatacggatgcttatgatgcgaccgatgagaaaataaaattgaaaattgaccacacttaccgggtggcggaactgtgcgagcggatcgcgaaggcagagcagatggagaagacagaggttgatctggcatggctccttggaatgctgcacgatgtgggaagatttgaacaactccggagatacgggacattcagcgatgcggattccatcgatcatgcagcgctcggagcagacattttgtttggcggagtgctccgggaaggggaaggtctgatccgcacgtatgtggacgatgcggcggaggatgaggtgattgagactgccataagagtgcacagtgcctaccggattccggaggggcttgcgccgcgcacggaaaagctgtgccatattctgcgggacgccgacaagatcgatattctgcgggtcaatgtggatgtgccgctggaggagatttacaataccacgacggaggaactgcgcaacgcagccgtcacaccggcagtgatggatagcttttatgaacatcatgcgacgctgcgcagtatcaagcgcacgccggtggatcatgtggtaggacatatctcgctggtgtttgaactggtatttccggagagtgtgcggattgtaaaagcgcagggttatctggaaaaactgctgcattttgagagccgcaacgctgtgacaaacgcgcagttcgcagagcttcgggcggagatggagcgctatcttaagggaaggtaatgcctgctccacggtttgggaaaatgagcgcagcagcgcagtccgcggcaaagagcagcagaagcagggtgtttaatccaaggcgcactttgggggagagacgtttccagagtctggtgagcggcgcctccaacacacagatccagagcacgcccgcgatgccgaaaccgaccgtcgcgtacagacagatatagccatgaaaatgtaaaggatagccgctgtaatcccagtagcgcaggtcccagaaggtatccagaaaccatccgatcaggagttccagactggtgccgatggcggcactgaggaaaaagacgccggccgggtggattttttttcgccggcagcccagcagcagatagaaaagcactgcgccgatgccgtagaccggaagccacggcccgtagaagaagccgcggttggcaaaggttttgtcccgatacagaaagatggcaacctcccagagaaacccgccgatcgagccgagaaagaagaaataaatctgttgggagaggaaaaacgatataggagtctgctccggtgcgcagagtttggaaaaatccggaagacggtcatgttttttcatggagatagtataaccggaacgttgaaaattattgaattgtgaaatggtggaaaatatagaaatgcgccttgtaaattgcgggagcgtatcttataatagtagcaattgagcaaaccgccctttgcggcggaaaaacatcaggaggaaaagagtgtggaaatgaacaacaatttttcacaggaaaaagtcattgtcatcgactttggcggtcagtacaaccagctggttgccagacgtgtcagagagtgcaatgtttactgtgagatctattcctaccgtacagacatcgagcagatcaaggcgatgaatccgaagggtatcattttaaccggcggtccgaacagctgctacgagccggattctccgacgtacacgaaggaactgtttgaacttggaattccggttttgggactctgctacggtgcgcagcttatgatgcatgtgctgggcggaaaggttgagaaggcaccggtgcgtgagtatggcaagacagaggtgtttgtcgatacgacatcgccgcttttcggcgatgtgtctgagaagacgatctgctggatgagccattttgattatatttcaaaagttgctccgggattttccattgcggcgcacacggcagactgtccggtggcggcagcggagaaccgcgagaagaaactttttgcaatccagttccatccggaagtgcttcacacccaggagggcaccaggatgttgcacaatttcgtgcgcggtgtctgcggttgtgccggaacctggcgcatggatcattttgtggagcacacgatcgaggcgatccgcgagaaggtcggtgacggcaaggtgctccttgcactgtccggcggtgtggattcctcagtcgcagcaggacttttatccagagcgatcggcaagcagctcacctgcgtgttcgtggatcacggtctcctgcgcaagaatgagggcgatgaggtggggagcgtatttggcccggacggtcagttcgacctgaattttatccgcgtcaacgcacaggagcgctactatgcgaagctggcaggcgtgacggagccggagcagaagcgcaagatcatcggcgaggagttcatccgtgtctttgaggaagaggcgaagaagatcggtgcagtggatttcctggcacagggaaccatttatccggacgtcgtggagagcggtcttggcggggaatccgcagttatcaagtcacaccacaatgtcggaggtctgccggactatgttgatttcaaggagatcatcgagccgctgcgcaatctgttcaaggatgaggtgcgtaaggcaggtcttgagcttggcattccggagaatctggtattccgccagccgttcccgggaccgggactcggcatccgcatcatcggcgaggtgacggcagacaaagtccgcattgtgcaggacgctgatgccatctaccgcgaggagattgcaaaagccggactggaccgttcgatcggtcagtattttgctgcactcaccaatatgagaagcgtcggagtcatgggggatgagagaacctatgattatgcagttgcactgcgcgccgtgaatacggtggatttcatgaccgcggaggcggcggagatcccgttcgaggtgctgcagacggtgatgagccggattatcaatgaggtgcgcggggtgaatagagtattctatgatctgaccagtaagccaccgggaacgattgagtttgaataacagattaaaatgccgaaagcctgtatttatgcgggcttccggcatttgctttatcaaatggctctagtcgggctctatttaagaacggagtaatgataggaagatagaaaggacagaaataaggaggagattgtcatgcaatatgtcagaaagttaagtaaaggtgataaggtagcggttgtcagtttgctaagagatattgttggaaatattccagtagatagaagtttacttgaaagtgatgctccttttacaaaagggctaagcgaaaaatagacagtcaatgttaatgatttgatatacaagtatatagacgagttgtattattaggaaattgatgttgtaaagaagaggataaaggcaaattttgctgagctgttaaaaagtagtgcgcttgtatttggaggtacaaatggatcgaatatcatatttgttgcaaacgataatggattatatgctaaataatgatttgaatattgataaagcaacattttttacagtgataattgggcaaattacaatatatggaatattattaactttttatcaatttgtggcatcctaccaaggtaatgaaaggtctgtaactagatatttgggaattaacattactgagtattttgtaaagaaaaagataaagatttttaatagtattatctctaagaaaatgtttggcatattgttgattttggaaattctatataaaccatttataacaatatatggggagaccattggtacctcaacaactagtataataaatttcatatggtttttatttgctattgggtattttatattgttcgttatgctctttatacaatgcacaaaaagtatattaatgataaaaatgagttctgatgtaaaaagaaatggctatataattagtgaaattaataaagactttttgaaaaagacaatgaaagaacaaataagcaaaaaagctatagatttgttgagacgagatttggcaaatttgcgtgatgtgattcaagttgatgataatactgaactacaaggcagatataatcatttgattcagttgatttttactggctatgttgagagaaaagaatatgaaatttacaatattgaaaagagagggacaatatcaaagaatcaagtacagtggatagataattcaaattgtgaagtatgtttgctacaagaaattgcaaacgaagtttattttcggctggatgagcaaaatgtaaggctgattatgaatttttatattgatttaattaggttaaatcttattaggtctaaacaggcaggatgtagtagagtgagatttaataggtatgatcgcttgtcaacgaaggtagagaaaaaaatatttgatgtaagttcatggaaagatgtaacactaaagatatatcaaaaaatgtcagatgaaaataagcgagagttaattcggcttttacaaagggatgtaaatcagaagcaggatttttatgagcagtactgtaaagaatgtattaatgatttgattagcgcggaaatcgattgtgtatttttagggaaaagggaacaaaaggactttgtaaaaatatttagtcagataacagaagataaatattttaatgatgtttattcgcaattaataagggataaaattatttattataataggtttgatgcaggagaaatcataggtcagttaaatggaaaaaattgtacatatctttttgtgtatatagtgctgtattattcaatttatagattcagatttgattgggaatatattaatataaaagtattgagaactctgtggaagcaacatagtagtttgcaagatgatgctgaggaagtgatagaaaagatacgtaattcaaacattggacatcgttttgagaagaaaatgtattttaaattcatggagtatattaacgcgagctttgacggtgaactatttaatatggtttataatgataaaatattggatgtattttatgtttggattataaaaacaagtgttatcaatcaatacgattttatgtattcaatatataaagataatttagatattgatattcaaatagcaattattaatgacttagcaaagcatgatgaattgatggaatgtgaaagtatatatgcttggatacagtatatgagatataggacattttctatgtacaaatttgtcccggaaaaactaaatattacactcagaagtcttttacttacaagtataaatgctgtaattgttgcaaactatgcacatgtaaatcgctatttttatggtgatgatattggggcatatttattagtaaagatacatgaattatctgataaggctagaaagcagaaacaaataaaagaaattataaaaaatgcatttatcgcaagtagtatggatatagatgaatatataaatatgatagaggaagaatgctataaatgtaggcgtgaaataaattatgtccaaaaggagaagatgaaagagtatttgatgaagacattttagagaaaactgtgtacaaaaaggtagataatattgtgcacagtttagatgaaaacaagttaattaaatatattcatacacccacatattcttgcaaaacattggacttgcaagttaattcagcatatagcagcggattgacctatagtagacggtatagatacacaatatcgtcaggtgtattgtgaaagactactgaagtgcatttctcataactgatagtaacaggtgagccagtaaaatcatcattgatggcattaataataacggaatctgtagaggaatcatacatatcaaacaggtaatatggattattttgttttgtgatgttctcctttccacagatacttggcatcatccggcagatcaatgatggagtaagcatattgttgtggtcagtctgtaattctttgatttcatcactggtaggaagattgtttaaagtttggggtttatagcattcggtaaatgctttctacatttcgagtaattgcagatatagtgcatttaccgaatgtaccaacggatatgtgggttctttcttgccaacaacacagatgcgattatagatgcatgaacggataaagtaatctttcttcgtcatgccactggcaaggatgctaacttcgatttgtttatgtttagcatcgttgactcaaaaacttatggttggatatttatgttgattgcttatggtaaagctcttttcatggtgagtttggtagcaggcacgaataagcgcctgtaaaccacattgattatttatttttagtactaaaagtagattatatctgttagagattttaaaaaagtaatatgatatcaaggcaactaatttgcaactatagtttttgaaaacgatatgaaaagagcaacattagatgaaataaaggtggtgcaataccacataaaatcagtatttttgatttgatgatatttcctttgggaagagtttgaacaagtaaagagatccatacaaagtctgtgattctgagctttgtgtggatttttttgtggcaataagtacagaagggatctgcaattatcgaattggtgtcccattaaaaaataaagggtaatatttgaaaaatgtaataatattaattagcttatctttactatttgaatccagtgaaacaagtgctggaatattatgaaatgagtgtaattcttcatttaatgtattgttgtattgctgcaaaaatatagataagaataggtgttcactactgcttatcccacttattgttttcattatcgtttcattatcgttaatttgtaatacaccattttgaccgaacttccatattgtatcaaagttcaggagtggggtggaaaatgtatagtcccaaacatttcggagaagaaattcatatgtatattttttatagacattattaatttggtaaaaaatatcatttagcaagttacaaaagtacaatatataattttggacatctgcataatatggcgataagatatgttgatctatgtgtaagaggagtaattcagactttgcatcatcatgtattatgctatttcgcagttgtgaaattttttttattttgttttcatctacatagagttcgagagataaactatgtttaaaaaaagagatatattctaaaagagtcttgcaggaatatttccgaatgattttattgactgatgataaaattatgtcatgtgttgatgaagttgaaagtagctcagttttttctagagttatgttattgtctagcttttcaggaaatgctagaagataataacgcaaaatttctgtaagagtgctttcaaatatggcatatgaatatataaaagaaggtttgagagttttctcactcatatttgaaagagtagattgaatttcatcggttttatttaatattagtgtagaaacatctttacatacaaaaaatcgtatcataataaagtacctcacaaaaatgtgtttatcaagttataaaagccataatatttttgaattcaattccaacttataaatactttagcatgtgctgtttgaagcgtaaatatttttactaaggttactattctgattaatatccattttaatattaaatatagaataacacatataaataaaaaataaagaaaaagataatgaggcagggaaaaagcaaagggcgagaaaaaccgtagatgttgcattagatgatatggagaaaaaatgggtaatatttgtagggcggagaagagtgaagatagaattgtatatagattaagaacattagagaaaactatctgtttttttgcagtatatttgaaaaaataatggagttatcaagacaagcgtggtaaaattaaaaaggattatgtttataggaaactccaaatgaaattttggaaaacagttctattacacagaagaaagagaataggcattagttataagtgagaggagtacatatatggcattagcaaagtggtataaaattgattttcacactcatactccagaaagcaaatgcttttcagataaaagtgtgacaccggaacaatggttaaaagctgctaaagaatcgggcattaatgcggttgtggtaagcgatcataattctgttggttggattagtaaaatcgaagaggtaaagtctaattacgaagatacaaatttcaaagtgttttatggaattgaactttgtgtttcgtcggcttttacacactttcttattatttttgatgataaaatgtctgtgactgaaattgaagatgcagttgtaagctatttgggattacaaagaaaagattgggctgatacaacagttaatgtgtctgaggatagattgaaaacattatgtactgaattgaatgaaaaaatatttgtgataccggctcattttgcgtctaataagggacttggaaaaagcacggaaaatgcaataaaaaagtatcaggagtttctttgtttttcagcgattgaggtgagaaatgatgaagatgctagagagtacaataacaaattaagaaataatgttattaacaaagcggtattggttacaggatcagataacccatcaaatagagacgaaaaccaacattcaatagaagggtttggtaaaatgtttacatgggttaagctttcgacattatcttttgaaggattacgacaggtatttattgatcctgagcacagatgtattaactggctagaactacagaatataggggtgcagtttgatccgaatgaaactacttataattatataagtggtattgaatttgaaggtatttctcatatgacaaaaatgaatatgagattttctcctaatttgaactgcatagtaggaagtaggggaacaggaaaatctacgattgtagacgccataaattatggcgtatgcaatgaaacggatcttacaaaatgtaagctgttggaaaagacattaacaaaagatgccaaaatttcaacatattttaattttggcatagcaaaaccatatgtgattaaggtatcgagacgtggaaaacagcttgtaagtgaagttgaagataataatggttgtgttgtaaatcccccagagtttaaaattgatttttatgggcagaaagaaatttttagcttaatagatgaggatgatagcattgcaaatcaaacgacgagtccattggtaaaaatgattgatgataagatagctgcagatatgtatatgtattcagatcaaattgatgatgcaatatcgaacatgttgaagtacgctgaggagtttaaaagtaatagaaggagaattaaagaaatacctacaataaaagctgaaatggaaaaggctgacacgattttaaaaaaatttaaggcaagtggaattgaaaaagccagaagagattttgagactgttgataacaaaataaacaatattgaaaaaacatttgtttcagaattaggtaaagtaaatggggccattgctggttttgaagaccaaagaagggaattagagtcacgtattggtgaactcgataaaacggaagaaaacgtaattgagatcgagatgtttaaaaaattggcagatatcaatcaaagccttattgatgtgttgaatcaaaaaagagatgctattgaatcgatggaaaaagcatatgaagtatcgcctacttatgcgaggcgagaggaagcgcataataaatatttgagtgcgttagaagaagttagaaatactggaggggaagatattaatggtattcaagatcagctccaaaaaaatacacaaagatataatgaattggtattgttgctgaaggaacaagaaaatgtagaaaagaaaatagaggaaagcataaatgtttttgttgataaacggcttgaactatcccaaaagagacaggatgtaattgatgaactaaatttagagagtatttctattaaagttattccgttagggcatttgtcaagatggaaggcaaacttacagaaggaacttggaaaagagggaacttttgacagcgattttcaaaagttggtagaacaatctttatctgcgaacagtgattggaagggatataaagtccttttaaagtttatgttgatgactgacacaggtaatatagaagatgtgcttggaccactggcggatatgcgatttgctaagctttggaaagataaatacaacaacgatacattaagttcaatggttaaggtattcccggaggataaattacaaattaagataatagatgagaatggatcaattgatattaatgaaggctcacctggtcagaagagtgcagctatactggcatttattttgaatagtggtgagaatccattgattattgatcaaccagaagatgatttagataatagtttaatatattcacttgttgtaaaatctataaggaaaatgaagaataaacgccaaattattattgttacacataatcctaatattcccgtcttgggcgatgcagaaggaattattgttttggagcgtaataatgaggggaaagttacctttaggaaagataaaaaaacaggatgtattgaagaaaaacttattagggaaggtatttgcgaaattatggaggggggagaggacgcttttcgtaaacgagaacaaaagtatcaatataagtaagggatacagggggtaaataaaatggtaaagaaaaatggcactagaattttttaaggaacttttgctcgaggtcatagataaccccaccttccaagcttttgcaacctgaatttcggacatgcaccgcaaaaaatatacctacaataaaattagcttcccccatgcagggtatgtcttgtcttcaagacataccctgcatttgtgttttaaaagccatcatgctaaaatgggatacatagtgacaggcaaaaggaggttttaccatgtattatgtaccggatggcacaaagcagtgcggatattatgaatgtaaaaagtgcgggaatcggtttctgtccttgcagacgatgacgcggattccctgtccggattgtgcatcggaggttgattatgagatcgggccggatgaaacgcttgcggacgtgacagatacggcagtgcttctgcagaaaatcgagggcgaggaggaagtggcgaaaatggatgcgctcttaagccttgcgattaccggcggggactttaactggatttaagaaaagatagaacgggcagtggatgaaacagataagacacagaacaggagcggtgacagagatggaacggacaacggcaaaaaagaataaatatgagatcgatatgtgcaacggaacgattatggacaaattgatttccttctcgttgccgcttatgctgtcgggtattttgcagttgatgttcaatgcagtagatattatcgtggtgggcaggttttccggcagccaggcgctggcggcggtgggatcgaccagtgcgctcatcaacgtgttcacgaatctgtttatcggaatttcgctgggggcaaatgtactgacggcgcgtttctatgcggcggggcgtgagaaagaggtgtctgagaccgtacataccgcgataaccctggcactggtcagcggaattgtcatggcgctggtgggacttgttttttccaagggagcgctggcgctgatggggacgccggacgacgtcatcgggctgtcggcactttatatgcggatttatttcctgggaatgccgtttttcatgctctacaattatggcgcggcgatcctgcgcgctgtcggggacacgaagcgtccgctgctgtttttgatgattgcgggagtcatcaacgcgtgcttgaatatggtgctggtcattgtattcaagctcggcgttgccggtgtggcgatcgccacggtgatttcacagatgatttcctgtgtgctggtgctgcgttgcctctgccggtcggagagcagttatcggctgcgtttttccgagcttggcatgaaagggtactacttaaagcagatcttttcggtcggtgttccggcgggaatccagagcacggtcattaacttttccaatgtgctcctgcagtcttcggtcaattcgttcggatcgacggcgatggcaggctacacggcggcaaacaatctgctcggctttttgtatgtgtcggtgaactccatcacacaggcgtgcatgagctttaccagccagaattacggcgttgggaaattaaagcgcatggatcgtgtgctggcagactgcatgatcttatcggtcgtggtcgctgtagttttgggatgcatctgctatgggttcggcccggagattttacagatctacacggaggatgccgaggtaattgcgtgcggtatggagatccttgcatacacgacgattacatattttctgtgcggctggatggatttgttcccgggggcgctgcgtggcatgggatattctgcggtgccgatggtgttgtcggtcatcggaacggttggtacgagagtggtgtggatttttggcatttttccataccacagatcactggcgattctgttcatttcttatccggcatcgtggattatcacgattattttacaagtcgtctgcttttattttgtgagacggcgggttcataggaggagccaggcgctcgccgggcaggaagcctgattccggaatccagcagaaaatccggcggaaagtgacagaaaccctgccagaaatctgccggggcgaggtggaacccaatcccggaatcctacaggaaccccagctcatagccctgcccatataactacacggagacaacgatggaagcatattattacagcaaaatggacaaaacaaagcaggcggcatatcatgcgatgctgcagggactattggcgttggaggattccattccgatgccgcgccttgaggcggaggatctctatcaggtatttttcctgctgcggctggatcatccggagattttctgggcgaccggctacaagtaccggtattatccggagtcggcgaaccttgtgttcctgccggaatacctctttgaaaaaggcaagatcagagagcaccagaaggcgatgaaggcgcgggtggaaaaactggcgcgcgcggcgcagaatctctccgagtgggagaaggaaaaatacgtccatgactttatctgcgaaaacgtgcactacgataagctgaaaaagccgtattcccatgagatcataggtcctctcggacagggtgtgggcgtctgtgagggaatcgcaaagtcagtaaaggtgctttgcaatgcgcttggcatttggtgcgtgattgctctgtgcggaaactgcccagagaaggggatcaaataccgccatacgtggaacattgtaaaaatcggcgggcagtattatcatctggatgccacatttgacaacacgctcggtgcgggagcacagatccggtacgattatttcaatctctgcgacaagagcgtattccgggatcatcagcccctgatcgcgcctgtgccggaatgtacggatgcacagcatttttattatcgggagaaaaagctttccttcacgaaggtggaggatgtctataaacgtgcgcttcagacagcaaaaaaaggaaaaacgtttacctttcactggaggggcgggtatctcaccagggaggtcttgggggaactgttagaacagatttccgcggccggcagggagcggggaaaaagcgccagagtcagtgtgaactggcagcaggcggtgctccggttcgattatgtggaggctggcagtgcgccggaggcgagtgttgtgatggaagaagcgaatgagggagaaaaagaatgacggaagacttactggaacagattcagagaaaggatgcggcggcgtttacacacggagggaagtttcatgcagacgatgtgttttccgcggcgctgctgctttacctgaatccggagattgtaattacgcgcggcaacagggtgccggagaattttgccgggatcgtgtttgacatcggaagaggacggtacgaccatcatcagaaagacagccgggtgcgggagaacggtgtgccctatgcggcgttcggactgctgtgggaggagctcgggggagcaatcctcggggaggagctggcggcggaatttgacgaggcgtttgtacagccgttggataataacgacaacaccggggagaaaaacgagctggcgacgctcattggcaattttaacccggcatgggatgcgcagggcggaagcgacgccgccttttttcaggcggtcagcgtggcgggcatgattcttgaaaataaattcgagcgctatcgcggaaatgagcgcgccgaccgtcagatcgaggaagtgctggcggcgcatgagcgtgccgtagtgtccggggagacggcggagcgcgatgccgcgattctgatattgccctattttatcccgtgccagaaacgcctgtcggagaccgggattgcgtttgtgattttcccgtcgaaccggggcggatactgtatccagccgcagaagcgggagtattctctccattataagtgcagcttcccggaatgctggcttggactggaaaaggaagaactggcggaggcatcaggtttagagagcgccgttttctgccataagggcggttttctcatgacggtcggggaactttccgatgcagtggaggcatgccggatcagtctggacagctttaaggaggagaaggcgtttgtaaacgtgggcggcggagagacagcggatgaacttttaagagaactgccggggatggcggaagcgcagatctatcacatgccgctgccagagctgccggaactggaacaggacggcagttacggtgaagtggcgatggaaaaagccgactggaagcttcggaacaaggattatgtgaaacagatcctgcagtgccggccggaggccgtttacgtcgagggggatgtatttgcggcatatccggtggtgcatctgctccggaaaaagcacgtgccggtgcttgccatggcggagcgcggcggggagcggattctcgtgcggattccgtccggttcctagatgggacttgtagaagacaagcgaaaagtgctatgattcttatgcaatgtggaatatgctttagggaatttctgcttccggcgaagaggcaggaaaatcagatagacataccaaggaggaatggacaatggcttgtacaacgattttagtggggaaaaaagcatcatatgatggatcaacgatgattgcgcgcaacgacgattcgggttcgggacattttacaccgaagaaatttgtggtcgtgcatccggaggagcagccgcgacactacgagtctgtgatttcacatgtgaagatcgagctgccggagcagccgatgcgctacacggcggtgccgaatgcggtcgacgggaaaggtatctgggcggcaagcggcgtgaatgaggcacatgttgccatgacggcgacggagacgatcacctcgaatccgcgcgtgctcggcgcagatccgctggtggtataccagaaggcagaggatggtcagccggagatatgtggagggatcggcgaggaagatcttgtgtgtcttgtacttccgtatatccgcagcgccagagagggtgtcagacgtctgggaagcctgctggagcagtacggcacctatgagatgaacggcattgcatttcaggatcaggatgagatctggtggctggagacaatcggcggacatcactggatggcgcgcagagtgccggatgatgtctatgtggtcatgccgaaccagcttggaatcgaccggtttgatttttccgatgccctcggggagcagaaggaatatatgtgctcggcggatctggaagaattcgtaaagacgtatcatctggatctctcacaggatggcgagtttcatccgcgcgacgcgtttggcagccatgacgatgcggatcatgtatacaacacgccgcgtgcgtggttcatggagcgttatctgaatccgcacacgaaggtgtgggatgaaccgcatgcggatttcgcaccggcttcggatgatcttccgtggtgcatggtgccggagaaaaaagtgacggtggaggacgtcaaatacgtcttatcatcccatttccagggaacgccgtatgacccgtatgccgcttacggggataagtccctgcgcggtgcataccgctcgattggcatcaaccggaacgattttctcgcagtgatccagatgcgcccgcagatggagcaggagaacggcgtgattgaatggctggcatttgcgtcgaacgcatttaacgtgctggtgccgttctatgccgatgtggaggagacgccggaatatctggcgaacacgacaggcgaggtgtccacggagaacttttactggtcgagccggctgattgcggcgatggcagacgcatcctaccggagctcggtgttccatatcgagcgctatcaggagcatgtgatggcgaagggacacgagctgatccatcactacgacgcgctcctctccaaggagacagatgccgtgatgcgcagaagacttcgcgaggaggcaaaccgcagtattgcgaagatgctgcagaaggagacggcagataccctggacaaggttttatatgaacttagcggccagatgaagaatgcatattccagatcggatgcatagggaggactgccatggtaaaaattgatctgatcacgggtttcctcggatctgggaagacgacgtttttgaaaaaatatgcgaaacgcctgatggagcagggacagaatatcggaattctggaaaatgatttcggcgcggtcaatgtcgatatgatgctgctgcaggagttagagggggagcagtgcgaactggagatgatctccggcggctgcgatcctgagacgcaccgcagaaggttccgcaccaagctgatcgctatgggaatgtgcgggtatgaacgcgtgctcgtggagccgtcgggaatctacgacatggacgagttctttgacgtgttgcatgaggagccgctggatcagtggtacgagatcggcaatgtgattgctgtggtggacgcgcgtctggaggacacactttcaccggaggcggagtacctgctggcgtcgcaggcggcaaatgccggctgtatgattttaagcaagtgcgacacggcgacagaggagcagcggcagaatacgatcgcgcatttgaagcggtcgcttgcggcgctcggctgcaagcagcgggcggatcagaaaatcttgtgcgagggcgcagaaccgctcccagatcaggagtttgccgcgattctctcctgcggttattatatcgcaagctatgagaagccggactttgcgaagggacaggcgtttgagtcgttgtattttctggatatgcatctggacggagatgcggttacggcggcggtgaagaagatgttgaaagatccggcgtgcggacatattttccgtgtgaagggatttttgcagaatccggatggcacatggctggagatcaatgcaacacagcaggagatcacgcgaaagccgattgcaaatgggcaggatgttctgattgtgatcggagagaatcttgtggaagacaccatccgggcgtattggaaaggttagagacagacgatgatttatgtgatgatggcgctctatcaggaggcacacggactcatccgggaactggaattaaaaaagaacacggcgtatgcgccgtttgaggtgtttgacaatgagagcgcaggcatccggctggttgtgaccggtgtgggggagattgctgcggctgctgcgaccgcggcagtctgtgcgcgggatggagcagatgcggcagactttctcatcaatatcggctgctgcgcagcagcaaacgctggcgcggacagtggctgtgaaccggcagaccgggacatggacagcggatacggggcggcatacgccgcacagatcggagacctgtacgtgtgtcacaagatcacggagcaggcaaccgggaaaacgttctatccggatattctgtaccggcacccgtggaaggaacgtgaacttgtgaccgggatgcagccgctgcaaagagcagcggcacacggagctttatatgatatggaagcggcggccgtctatcaggcaggcatccgctttttttctccggaccggatgctctttttgaaggtggtatcggatttcggagttgcagggcaggagagaatgacggcggagacgctcacggggctgctggagcagcatgtaaaggaggtcgcggcatttcttacaaatctgcgggaggcggcagacgaggaggagacgctgcgaaacgacggcattttgcaggaagacgagacggtgctggagcggctttttgcggcgctgcactgctcgcagacgatgcgggcgtcggcgcggcagtatatcacgtatgcggcgcttaccggatacgactggaaagcggaactggaagaatggtatgcgcgggggctgctcccgtgcaaagacaggcgggaagggaaggtgcggcttgaagaacttaaacaggtcttattataatccgccgttttcccatatctatgtggagcgggaagtggcggaagatccggagactaagcggatgcttgcgcagtttccgcaggcagaagtgattgtcatcgaccactataaggatgttttctgccggagcaggcaggactatgtcaggcagcatgcggcgcagaatctgattctggcggcgaagcacggtgagctgctttatccgggcgcgccggtctgccagaactttggaaatgaacatttttactacacctcctgtgtgatgaactgcgtgtttgactgtgaatactgctatctgaagggaatgtatccgtccgccaacctggtggtgttcgtcaatcttgaggatatttttgcggaagtggaaaagagacttgccgtgcacccggtctacctgtgcgtgtcctatgacacggatctgctggcgttagagcatctgaccggttatgcggcacgctggatcgagtttgtgcgcagggtgaatgccggcgggcagcggctgcgcatcgagcttagaaccaagggaaccggaggcagcctgtggcagatggtccggccggaggcgggtgtcatctgtgcgtttaccatctcaccgcagcaggtgattgatgcatatgagcatggtacggcttcgcttgccgggcggctggcaggagcgaaggcggcgatggaacacggcttttcggtgcgtctctgctttgacccgatgatttattgcagtgactggaagaatcactatgacgcgatgcttgcgcaggtctgtgggacgctggatctggaaaaactatcggatgtcagcgtcggaaccttccgcatctcccaggattatttgaagaagatgcggaaaaatgagccggactcggcggtggtgcagttcccctaccagaatgacagcggggtgtatcactatccgacggcgctcatggaggagatggagcagtatatgacggaaaaacttgccgcttatcttccggcagagcggattttccggtggaaggaataaggagagagtacatggagcagtgtagagaaaacaaggcggcgattgtcacgggggcttcctccgggatcggggcggcgatcagtgccagactgtgcgaaatgggatatgaggtgtttggcatcgggcgctcgttcggcagcagttttgcggaacagtttccggacgctgcaggcaatccgctgtttcatgcggtggtctgtgatcttctggacacggaaaaaatgttgaagctggtgcgggggattgcggcggaagccgaggtgacgctgcttgtcaacaatgccggcagcgcatactacgggctgcacgaggagttaaacccgaagaagattcaggagatggtgcgcacagatatggaagtgccgatgatattaagccagcagctgctgcgcgggtttaagaaaaacaagggctgcatcgtcaatatcgcatccgtgacggcgcagcagtcgaatccgcatggctgtgcctacggcgcggtgaaggcgggacttgccagtttttcacgcagcctctttgacgaggcacggaaatacggcgtgcgggtggcggtggtatccccggatatgacgaagacggaattgtaccgcaatgcagactttacggtgggggaggagacggagagctatcttctgccgcaggatgtcgcggacgcggtggcgtatatcgtggggcagagagagggcgtggcggtgtcggaggtgacgctccgcccgcagtatcacagaatccggcgcaagccggtagcgaaaaaggagagaccggtcgaatgaaagatcttacaaaaggaaaaccgtcaacgctgattcttgcgtttgcactgccgatatttctggggaatctgctgcagctgacctacagcgtgaccgacacgagaattgtcggctcttttctcggggaggatgcgctcgccgcagtcggtgcaacgacgacgctcagcaatctcatcatcggctttttgctcggactggcgaacgggtttgccatcatcacggcgcagcggttcggcgcaaaggatatccggggcgtgaaaaaatcgtttgccgcttccctggtgctaggaacggtgatctcggtcgtgctgacggtgcttggactggtgtttttacagccgatcctgcggtttttaaatgtgccggaacatctgattccggtggcgggaccttacatatttatcatcatagcgggacttcttgcgacatttctctatgacgcgtgtgccgcggcgcttcgggcgctcggggataccgtcacgccgctcgtgattctggcagtgtcggtggcgttaaatatcgcgggagatcttctgttcgtgctggtgttaaaagcgggagtgcggggagctgccgccgccacggttctggcacagattctggcgtttgtgatctgctggctctacatgttgagacggtatgaaatgctccgccttgtgcgggaggatttccgggatgcggatatggcgatgatgaaaaacatgctcggatcggggctgtcaatgggctttatgagctcactggtcaatatcggctcgctgacactccagacggcgatcaataagctggggcaggatatcatcgtggcgcacacggcggcacggaaaatttctgagatttttatgacgatgttcagtgtcttcggacagacgatggcgacttactgcggacagaatctgggcgcaggcaggatcgaccgggttaaaaaaggcatccggctcggcattttctacacctgcatctggtgtacgctttccgcggtggcgagctacacgatcggcagctggctggtatatcttgtgacgggaagcacgaatgaggttgtgatcttaaatgcgaccagctacctgaaattcgacacgctgttctactatgtgacggcggtgatctgcgtgctccgaaacgccatgcagggactgggcgatcatatcacgccgctcatttcgagttcgcttgagatggtcgggaaaatcgtgatcgccgccacgcttgtgccgatgttaggctacaccggtgtcattgtggcggagccgctcgtgtggtttatcatggtaattccgctcgtcgtgcagatcttccggatgccggtacttcgggaagaaaacaggggaaatcaaggaaaatgatgcgtagttggacgataacaacgcttgaaatgccataaaatcaagcaattacaggatttcacaaaaagttcacagaaaattagcactcaacacttgacagcgctaataaacggtgttataacatagtcagaacaaaggagaggaacaaaaggagaacaggaaatgagttctatgagttcccagaacatcccggttccaaagaaacaaggaaacagcatgagtgtatctgccgaaggcaggtacgaagtagaaaaggagagatgacttatgttaacacctagtatttttggagagaacttatttgatgactggtttgatgatttcccatttttcgatgacagagatttgcgcaaggttgacaagaagctgtacggcagaagagccggtaacctgatgaagacagatattcaggagatgaaggatggctacaagatggaagttgatcttccgggcttcaagaaggatgagattgccgtagagctggatgacggatatctgaccatcagtgccgccaagggactggatcaggacgagaaggagaaagaatccggacgttacatccgcagagagcgttacgcaggtgcttgcagccggagcttctatgtgggtgagggcgtaaccgaggaggatatcaaggctgagttcaagcacggtatcttaacgctggttgttccgaagaaggaagcaaagcctgcagtagagcagaagaaatacattgcgattgaaggataaggatgacagagagaaaggaagcgtatgatcatgtcagataagaatccaaaacatccgttgaagaagaaaaaagtagcagcaaaggtgaatatggcagaccatgaggcggtcgaggaagcgagagaagcctacaagtcgaaaaagcatgtttactaagcgatacgcctgcagatggcaggagaaaagggacagggagctgcacagcacgaagtgctgtgcgccccctgtccctttttcgtgtaataggaaacttcgttcctattacacaaaaacgtgtccaaagattacctattcgctagtccaactgcatggagttgagtttttctgccagcagatccaggaagcgcttgccgaaattacttagttcgtgatccctgcgggagatccagccaagttcgatccgttgatgcgtgtccagattcatgacggcgtaatctttttccagcagattctcaccggacatgccggaaccgatggtataggtgttcatctccatgccgatgctggcatctgccatctcgtccgtgagggtgattgttttttttgcgacggtattctccacaagctcctcggagaagaagcggtcttgggaactgtcgattccctgaaaatagtggctgtagacatagggagccaggtcttccatcgataccttcgtcctgccggcgagcggatgctgcctgggaacatagactttggggcgcatggttgccagcagatgaaaatcaagttcctgctgctccatctcccagtcgagaacgcggttctcacggtttttcaacagaacgccgatttcacagaattccgaagcgacgtaatctaagatctccttggtgcgcagctggtgagagtctataaagtgccggtgctaaagccggttatggatgtccttatggcactgagcaaagcgtttccgatgaatctggttctgctcatcttttatctgatctggacgacgcagttttccagtatcgcagcattttttcattcacagaagacgatcaaggatgtcagtctgatgtatgtggcgattgcagctttggtgttctgcagtcttgccagtatttcggaaatcataagaagcggtctgatctccgtggacaagggacagtatgaagcgggatatgcctcgggactgacaaaagcacagacctttttccatgtgattgtgccgcaggcggtgcgggcggtcattccaccgctcacgaacgatattctctcgctggtaaagggaacggcgttagtgtcggtcatcggagtgtcagatattctgacggattccatcaacgcggcaagtgcggcgtactcttatctggaggcgtatgtggcggcagccatggtattctggggcatcggaattgtgttagagcggctgagccactatgtggagcggaaattttcaaaaagcgttaagacactggcaggctgagatgcggtacggcatcgtacattattataataggaaggaaacagggctatggcagtattagaagtgagaaatgtaaaaaaggtttttggagataatgtgattttaagaggaatcgatcttgatgtacagaaaggggacgtcatcgtcatactcggaccgagcggttccggtaagaccacctttttgcgctgcctgaatcttctggaaaaaccggatgaaggctcgatggtcttaaacggaagagaatataacttaaaaaatgtaaaaaataaggaaaagctggagattcggagaaatacttccttcgttttccagaattataatctcttcgtgaacaagacggttctttccaatgtgacgctggggcttaccgtgggacgccatatgaaaaaggaagaggccgagaagaccggaaaagaacttttagacaaggtcggtcttgcaggaaagtacgattactacccggcacagctatccggcggcatgcagcagcgtgtcggaattgcacgggcaatggcagcgaatccagaggtcattctttttgatgagccgacgtccgcactcgatccggagctggtgggagaggtgttaaatgtcatgaaacagttcgcaaaacagggagtcacaatgattgtggtaacacatgagatgcagtttgcaagagaagtggcaagtcaggttatttttatggcagacggtgtggttgtggaaaaaggaacgccggagaagatctttgatcatccgaaggaggaggcaaccagaaaattcttaaaacgtattttaaaggaagagtcatagctgtgtgcgaagacggagaggagagaaagatatgcagaaatatgtgatttcaatttcaagacaatttggaagtctgggaagaccgattgcaaagaaactggcagaacttctggaaattgaatactacgacagagatattgtggaggaggcgtccaaagttcataacattccgttaaaggaagcgagcaatctggaggagtcggcaaagtatctgttcatgagtttcccactcggcagcggaaccacggcgacgcaggatgccctgtttaagacggagagcgagatgataaaaaaacttgccgtgaaggaatcctgcatcattgtcggcagatgcgcggacgcaattctggaggattgcgatcatctgatcagaatttttatctatgcgccgtacgaagaccgcattgtcaactgtgtcaatgatctcggcatggacacaaaggcggcgaagcggatgatccgtgatgtggacaaggcgagagatgcctaccatatgcggtatgcggggtatttgccgaacgatatgaaccatatggatctgatggtcaacagcgcaactctgggggtcgatatgacagcgagattgttggcggaagtggtgcgtgataaattttcataagacgggcagtgtgcataagactgcacagtcccacagaggataaggcatggaaaaacacagaaaaaaactgatcaaaaacgcaacggtattcgacgggcacagcagcgggctggcgcaagggaaaaagattgtcattgaggacgatattgtcacagagattactgcggatgaagtatcggaagaaaattttgacgaggtatttgacggcacgggcatggtggcgatgccgggaatgacggacgcgcatgttcacatgggatgtctgttcgcaaagggagaattcccggtggattacgccacggtgctgaccgtcgcaaaatgtaaggatgcgctgatggccgggtttaccacgttccgtgatgcgggaagtgtgagcgagggattaaagctggcgtttgacgagggtgtgcttccgggaccgcgcatctatccctgcggtgcctacatcagccagacgtgcgggcatggggattcggagtatgcgcatacctatcgcgacatccagtacaggcatccgtccagcaccgttttggcggacggggtgccggagatcatccgggcagtgcgcgagcagttctaccgcggtgcatcccacatcaaactgatggctaccgagatcttaaaccggcatgaggatatcaggcttttgttcggaacggatatgatgatcacgggaccggattatcaggtggagcagagcgaggatatccggtattacgaaaagcgcttcggcacaatgcgggcgctgagggctttgacgggcactgcaaacgaggtgtttgcacttacgacctaccagaatccttacccgaagggaaagatcggtgtgctggaggcgggatcctatgcagatctgcttctggtggatggagatccgacaaaaagtgtatcggttcttgcagacaccgatcatctgcgcctgattatgaaagggggaacggtgtacaaaaatacactgtgctgagattttattccactaatacgctgacttgcatgtggctgagattcgtagtaatcttattccaaaaactagaagcaggaggtaattatgaaagagctgctgtactggattgtggaatggattgcgaagattcacagccacattcttcgtctgaatgatgcgtatgaatacaattttacagataaagaactgcattttctcgtcattggtatgatgggaatgggattcatttttgtcgtgtatcctgtttttaaatggctggcaaagcatgatcatgtcatggtaattgcgtggatttatgtgctgacactgattatcgtgatcacgtttgccatagagatcgggcagaaagtaacaggcaccggcaatatggaatttgcagacattgtgatgggtgtattcggattcattgtaatgttccttgtgttctcggttgtgcggggtatttataagctgataagaaatctgatcagaggagacaggaaagatgaatgaattttggaaaagagtgctcgagacgtgcgtggtgattctggggaactgcctgtatgcattcggtgtggcaatgttcattgtgccgggaggactgattaccggcggaacgacgggaattgcgctgtttgtgcaccacatgatgggttgttccgtctccgtgtttgtactgctgttcaatacggttatgtttctgatcggatttgcggtattcgggaaaaaatttgcagcaaacacactggtcagcaccttcagctatccggtagcgctggagctgtttacacggcttctgcacggctatgcgatcacggacgatataattctctgcatgatctttggaggaatctgtatcggaggagccatcggcgttgtgatccgtgcgggcgcatcgactggcggcatggatataccgccacttgtgttgaaccgttattttaagataccggtgtcaaagtccatttatgtattcgatatgctgattttgctgctccaggcgtttgacagtacaggagaacagcttctctatggtattctgctggtgattgtctacagcgtggtgctggataagtgcctgatgcttggaactgcaaagatgcagatcaaagtagtcagtgagaaaatcgatgagatcagaaaagcagtcttaacagatatcgatcgcggtgttacaatgttaaaaagtgagaccggatacatggagcgggagacagagatgctgcttacggtggtgtcaatacaggaactggcgaagacggagaagctgatccattcggtggatgaggatgcatttgttgtgatcaatcgtgtcagtgaggtttccggccgcggtttttcaagtaaaaagcgttatctggaaaaggagaattcatgacattacagcaactgagatatgcactgacgatagccggctgcggatcgatgaatgaggcggcaaagcgtctgtttttatcgcagcccagtctgtccgagacggtaaaggaactggagcaggagatcgggctgcagatttttatgcgctcgaaccggggaatcatcatcacaccggagggtgaggagtttctggggtacgccagacaggtgatcgaccagtacggaatccttaaggcgcgctatgtggagaagcagcgcaaggaaaagttcagtgtgtccatgcagcactatacgtttgcggtcaaagcgtttgtggagactgtaaagaaagcagggatggacagctatgaattcgcggcgaacgagacgaccacatacgacgttatggagaatgtacgcaactttaagagcgagatcggcgttctgtatctgaacgattttaatgagcaggtgctgatgaagatcatccgggagaaggggttggagttcgaggaactgtttgcctgcgatacctatgtctatctgtggtcgggacatccgcttgcagggcagagcgtgatctccatggaagaactggacgagtatccgtgcctgtcctttgaccagggacggaacagctcgctctacctcgcggaagagatgaagagcacctacgattataagcggctgattaaggcgaacgaccgggcaacactgctaaactttatgattgggctgaacgcgtacacgctgtgctcgggaattatctgcgaggagctaaacggcagcgattacatggcaattccactcaaggagacggaaaagatgcggattggctatgtgaagcgcaaaggggcatcaatcagtcacatcggacagatctatatcgaagaattgaaaaaatataaagagaaaattatgtagtggttggctataggtttcacctatagccaactatcggcttcctgtattaacactttcccaaactgcctgttataataggcaatgtaatcaaaaaacacatgcagataacagacagcatggagtggagaagcaggaaggaggaaacgggtatgagagacacagcgcggcagatgagatcagcgatgatgtgtgacaggatgcgccagatgtccatgtgtgatggcatggatgcagatgttgtgcggcttttcccggattcttcagatctttggaagaacagatagataccggcgctatggagcgtgggttggggcagccgcagggctgctttttttattctatgttttagaaataacattttaggaggtggcagtgcatgccagcaattgcgatacgtcatttatcaaagaccttcgagcagaagggaaacagcgtggaagcgctgcgggatatctcgctcgacattgaggagggagacatctacggaatcattggaatgtccggtgccgggaaaagtaccctggtgcggtgtctgaattatctggagaggccgacgagcggtgaggttatcatcggcggaagagatctgggaacgctgaccgagaaagaactgcgggagcagcggagcgacatcgcaatgattttccagcatttcaaccttctcatgcaaaagagtgtgctggacaatgtatgtttcccgatgcagattgcgaagaaaaagaaggatgaggcgaagaaaagagcgcttgagctgctcgagactgtcggacttgccgacaaggcggacgcttatccggcacagctttccggcggacagaagcagagagtggcgatcgccagagctcttgcgacggatccgaagattctgctctgcgacgaggcaaccagtgccttagatccgcagacaacgcagtccattctggcactcttaaaggagatcaaccggaaattcggcatcacgattgtgattatcacgcatcagatgtccgtgatccgggaaatctgcagccatgtggcgattgtggaaaaaggaagcatcgtggaagtcggcctggtcgaggagattttcaaccatccgaaatcccgtgtggcgagaagcctgatcttgagcgaccgtgctgcggatgccgcgtcatattccggggcggaaggtgatactgcggatggagcggagctgaccggatggagcggtgagagcagacagcgggaccgcatcggcgacgataagaagcttcgtattgtattctcagagaattccgcatttgagcccgtcattgccaatatggtgttaaagttcggtacgccggtgaacatcctccgtgcagataccaagaatgtcggcggagtggcaaagggtgagatgattctgggacttccgtcagacgccgggctgcaggagcagatggaggcttatctggtggaaaagggacttgagattgaggaggtgaccggagatgtggaatagtcaggtaatcatcatgcttttggagggaatccgggacaccctgtatatgaccttagcgtccacattgtttggatatatcatcggacttccgatgggaattgtgctgactgtcacggacaaggacggcatccgtccgaatgcggcagtctacaaggtgctggatgtgatttccaacctgctgcgcagtattccgtttattattttgctgattgtgctgattccgttcaccagatttgtggtgggaagaagctacggatcgacggcgacgatcgtcccgctgacgattgcggcggcaccttacattgccagaatggtagaatcctcattaaaagaggtggatgcaggcgtcatcgaggcagcgcgctccatgggagcatccgattttcagattgtgaccaaggtcatgctggtggaggcgagaacgtctctgattgtcggagcaacgatttcccttggcacgattttaggatattccgcgatggcaggaaccgtcggcggaggcggactgggagatattgccatccgctatggttacaccagatggcagaccgatatcatggttgtcacagtggtgcttctggtaattttattccagattttccagacgatcggaatgaagattgcgaatcggctggatcgcagaaagtagcaataacaaatttgcatatatttttaagttttaaggaggacactattatgaaaaagaaagtattgtcaacgattctggcaggcgtgctcgcattatccgcattcgcaggatgcggaagcagcacggaggagagcacagacaccagtgcagcaacaaaggaagagacgcccgtagctgcaacggaggaggctgtgagtgctgagaacacagagagcaccgataccgcagcagaaggcggcaccatcaaagtggctgcatccgcaacaccgcacgcagagattcttgaggaagcaaagaagattcttgccgatgagggatgggatctggagatcaagattttcgacgactatgtaatgccgaacgaagtggtagaaagcggcgagtttgacgcaaactacttccagcacattccgtaccttgagagctttaacgaagagaagggaacccatctggtcaatgcaggcggcatccactatgagccgttcggcatctatccgggaacaaagtccgatctctccgagctggctgacggcgacaccatcgcagtgccgaacgataccacaaacgaggcgagagcacttcttctgttacaggataacggcatcattaccttaaaggaaggtgccggcttagaggcaaccgtcaatgatattgcagagaacccgcacaatgtcaagatcgaggagctggcagcagagcaggttgcaagagtggctccggaggttgcattcgttgtattaaacggtaactatgcattacaggcaggcttctccgttgcaaaagatgcattggcttacgaggcatccgattccgaggcagcgaagacctacgtgaacatcattgcagtaaaagagggacatgagaatgaccctggcatccaggcacttgtaaaagtattaaagtctgacgagatcaagcagtacatcaacgacacctatgacggagccgttatcccgtttgaggactagtttaaagaggaagaaattgtcgcaataagcatatcgtgctttgctttgataagtaatattatcaaaagaccacaccgtgggatttcatgtggaaatgcaggtggaaatttggttcaaaaaatgtggaatttctaaccagccgaatgtttgcatctgcgatgatccgtgtctttccaagtttgtagcactccacggactgtgtccgcaaatcatgagacaatttaagaactttcgtgtggcgcttttgccgctgctgaaaaaaacataatcgcgcgaagccgatgtctgagttgccatctgccttattttcaatagcagatggctgcgagtttcggttcgcgcgattttataatgtctgtgaagtagcggcattagccgccactagaaagttcgctcattgtctctgatttggcggacacactccgggagtgttcaaacgtggaagagacacggaatctgatgcaaacatgcagctggaagaaatgctcacatttttctccaacgaatttccatctgcatttccacatgaaatccccaagtgtgtttctaataatattacttatcccccaaagcggtctatgctgattgcaacaatttcttttgcgatattttgtagaagaagagtttctttcggctgtatgttgtggtaaaataacagatataagctgggagtaaaatttcccggcaattacgaaggggaatggagagaagtaccatgaaagaggagcagaaagtatcgtttattcactcaatttcagcaaagatcatgctgctgaccgtgcttgcagtggttatgtcggtgttgatcgtcgcattccgggcggaagcgggagcaaagaaggttgtcggagacgtcagtgcagattatattttaagcatggcggagatgggagtggagattgtgaacaatcttccacaggaggcggatgcaggagcatatgagaatgccttagcggatatcagtatggagggaattgattcttcctacgcctatcttgttgacacggacggcaccatgttatatcacccgaccgcggaaaagatcggacagccggtggagaatgctgtcgtgcttggcgtcgttgcagagcttgccaagggacaggtaccggtgaatgagacagtgacgtatgattttaagggcgttaccaaatatgcggcttacgcgatcacggcgaaccgtcagattgttgtggtgacggcggatgaagacgagatcatgaagccgctgaatcagatagtaagtaagattatgctgctgtcattggggatactggctgcagcgattgttctggcatacgtagtaagccagtttatctgcagaccgattcagcagattacaacgattattgtcgataccgcacagttggatttcagatcaaatccgaacggcgcaaagctgcgcagccgccgggatgagacgggagagatggcaaatgcggtacatgtgatgcgcaggaacctgcgttccatgattggcgatattgataccgcaagtaaccagattacacagaatgtggatggtctgcaggagattaccaccacggtggatcacatgtgttccgacaactccgcgacaagccagcagcttgcggcaggcatggaggagacggcggcaaccacagtaacaatcaacgaaaatatcgaggttatcaagaacggagcggatgatattaacagtatggcgacggagggcgcacggacctcggaagcgatcatgatgcgggcaaatgatctacgcaccaagacagttgaggcaagcaccaagacaatgacgatgtacaacaacgtcaagacaaaggcacaggaagccatcgagggatcgaaggcggtcgataagatcaacgaactgaccggcacgatcatggagatttcatcccagaccggactgcttgcactcaatgcttccatcgaagcggcaagagccggggaggcaggacgtggatttgcggtggttgcaacggagatcggaagccttgcggatcagacttccaaggcgatcaaggatatcggcacgattgtggatgctgtcaacgcagcagtttccaatatggcagaatgcttagaagagaccaccggatttctggagaataccgtgctgacggagtataaggaatttgagcaggtcagcgaacagtaccaggaggatgcggataccttcaagaccagtatgaacgacgtgagcgatgcgatggcgggtcttgccaattctatcgacgcgattgcacaggcacttagcggaatcaactccacagtgggcgagtcgtcgatcggcgtcagcgatattgcggagaagaccagcgacatggtggagaagacaggaaccacgcacgacatggtggaagagtgttatacctatgtggagaagctgcgtgagattgtgagccagtttgtattacagtaaataaaatatgatttgcagggaaaagggtatgcagatgttggagcgatgcagtacatcggaatcacgtcggcatacccttttttgggcaggcaggcataaacccgtccacattttcataggatgagttaacggcaaagcggtggacgtgctgctttgcgggaaactcaatggatgggggcagcgcatatgcaggaatattatcgcggaaaaacggaagaacgagggaaaaacgtgctcgaggatgaggagaaaaaatcctgggcggaaagttttctggaacagttaaacgatcctctgatctttattctgtttgtggcggcggcgatctccctgctgctgcgggaatacggcgatatggcaattattctggctgtggtgctgttaaatgcgacggtgggagtgatacaggagggaaaagcgaaaaaatcgctggaggtgttaaaacagatgaccagcccgcatgcactgcttctggaaggggatgaagtgcggcagattccggctgccgatctgatcccgggcgatcttgtggtgctggaagccggctgtcaggttccggcggatcttgtgctgacagaagcggtgaacctgaaaatagaagaatccgcactgaccggcgagtctgttccggtcaacaaggatacggcgcagaaccgcatggcatatatgtcgacaaatgtgacctacgggcgcggcgtggggagagtatctgccatcggtatggatacagagatcgggaaaattgccgggatgctgaaggcggcgaaggtcgagctgacgccgctgcagaagcggttggcggacctcggcaaaattttgggcacggtgtccgtattcttatgtgtgctcctttttggcatggcaatcctgcaaaaacgggatgtgggagagatgctgattacggcgatctctcttgcggtggcggcggtgccggagggacttcccgccattgtgacgatggtgctggcactttccgtctcgcggatggtgaaggtaaatgccattgtaaagcgcctgccgagcgtggagacattgggatgtgtcagcgttgtgtgctcggataagacgggaacactgacacagaaccgcatgactgtaaaaaaatgttacgtgaacggcagagtgcatgcggtaaaagaactgcatccggccggcgaccggtattttttgcagggattttctctctgcaacgacgcatccctccacggaggggaacgccgcggcgatccgacagaattagcgctcttggatatggcggcagcgttcggcatacagcgggagacattggaggacaccatgccgcggatcgacgagattgccttcgattcagagcggaaacggatgacgacactgcatgagacgttggacggcagaatctctttcacgaagggatcgccggatgaaatcctggagcggtgccggtatgtgtggagcaacggcaagacggcggcgttttctgcggcggcgagagaacaggcaaaacggggacttgccgagatgacggaagcgggacttcgcgtgctggcgattggcatgcatcctaaagcggcacagatggaggagagcgggcttacgtttctggggatggcaggaatggaagacccggtacgccccgaggcggcggaggcggtggaacagtttgcacgtgccggagtccggacgatcatgattaccggggacagggcggacacggcgcttgcgattgcacgccagctcggcattgccgagcggagggatgaatgtgtgacgggcgaggagatggagcggatggacgaacagatgctggcggcgcggatcagtagaacccgggtgtttgcccatgtatccccggagcacaaggtcagaatcgtgtccgcatgcaaaaagaacggggagattgtcgctatgacaggggacggagtcaatgacgctccgtcgttaaaatctgcggacgtgggaattgccatgggaatggcgggaacggatgtcgccagaaatgcggcggatatggtgctggcggatgacaattttgcaacgattgcaggagcgattgcgcaggggcgcagcatctatgaaaatatccgcaagtcggtgctgtttttactttcatctaatttcggagaaattatcacaatgctggcggcagttgccatggggctggcatcgcccttaaagtcgagccatattctctggatcaatctgattacggattccctgccggcgctggcactcggagtagatgtggaagaacagaaggactacatgaaccgcccgccgagacgccgggatgagagcctgtttgcgggcggcggctggggatgcacctgtttttacggtcttttgatcgcgggaatcagtatgcttgcctttttgcaggaaccggtcggcacgatcaaaagcgccgggatgacgctgacgattccacatctgcaggcggtgcttaaagatgcgcaggtactagcgcggtcgcaaacctacgcatttaccgtgctcggcatggcgcagttattccatgcgatcggcatgcgggatgtggagacctcggtgttttgcatgaaccatctggaaaaccgtctgatgctggcggcgttcgcggtgggaatcagtcttcagatgatggtcacggaagtgccgtattttgtacagctgtttggaacctgcagacttaccgccctggagtggacgaagctgcttggacttgcggcaatgccgctgctggcacatgaactgttggtgctgttttcctgcgcgggagaggtaaaggatgcgttaaggttgcagggagaggattgacaaaggcggcgtcggactgttatactccatacaatctaaataacagaactgctaaaggggagtagttttaaattgcagcgtcaacatacgcggtcttggacctggcgctgtgtaccatgaagattacccgtggttatgagacttttagcgcggaaagtatcgcagagatacatttcgtgctggaagtctcttttttaattttaagaaaacaggaggcagaaatgaaagagtggtatcagatttcaacggaagatgtgaaaaagaagatggagacttcagaacatggactcacaacggaggaggcggcaaaacggctggcgcaatacggggagaatgtgctggtggagggaaagaaaaagagtgtttttgcggtttttttcggacagtttgcggatcttctcgtgggaattctgattgtggcagccgcaatttccgcctgttcggggaatccggagagcacctttgtcattctggttgtgatcgtgctcaatgcgctgctaggaacggtccagtatgtaaaggcggagaagtcgctggagagtctgaaggatctgacgtcgccgaacgcgaaagtgctgcgctccggcgtgaaggtggagattccggcgaaggaagtcgtgccgggagaccttctgctgctggaggcgggagacatggtggcggcggacggcagaatccggcgcagctattcactgcaggtgaatgagagctcgctgacgggagaatcgacgaatgttgagaaaagagaaggtgtgatcgaacaggaggcggcgcttggcgaccgcgtgaacatggtgtattcgggaagtctggtgacttacggaagggcagaggtttttgtgacggagactgcgatgaacacggagatcggtaagattgcaggacttttaagcaatgcgaaggaaaaaaagacgccgctgcagattgcattggatgattttggaaaaaagctgtcatatctgattctggctgtctgtgcgctggtgttcggtctgtcaatgtaccgggatatgccgcttctggacgcgatgatgtttgcggtcgcgcttgcagttgcggcgattccggaagccctcggctcgatcgtgacaatcgtgcaggcgatgggaacccagaaaatggcgagggagcatgcgatcatcaaagatctgaaggcggtggagagtctgggctgtgtgtcggtgatctgttcggataagacgggcacgcttacacagaacaaaatgaccgtgcagaagatttatctggatcatacggcgatcatgccggaggcgctgcagatcaacgatcagcttcatcgttatctgatgtatgatgcgattttaaataacgatgcgcgcatggatgacgggaaagtgatcggcgacccgacggagtcagcactgctcaagatggtgcgtaaatgtggcgtggatgatgatttcttacggggagcaatggaacgacagcaggaactgccgtttgattcggaccgcaagctgatgagcacggtctatgcgctgcacggtgtaccgacactgctgaccaaaggggcgccggacgtccttttgaagcgcgcggtctatcttagggagaagcagggcatccggcggatgacggaggaagaccgtacggagattttagagcagaatcaaagattttccggggaggggcttcgtgtgctggcgtttgcttaccgggaactgaaagagagcgaggagctgacgctttccggggagtgtgattacatttttcttggacttgtggcgatgatcgacccgccgcgcgcggagtctgcggcggctgtggcagatgcgaagagagcgggaatccgaccggtcatgattacgggggaccataaagtgacggcgacggcgatcgcaaagcagattggcattttcggggagggggatatcgcactggtcggtcccgaactggacgccatgccggataaggagctggaccatctgatcggacacatcgccgtgtttgcccgcgtctccccggaaaataagatccgcattgtggaagcgtggcagcgcagggggagtgtggtcgccatgacgggagacggcgtcaatgatgcaccggcactgaaggcggcggacattggcgttgcgatgggaatcaccggaaccgaggtgtccaaagacgcggcagacatgatcctgaccgacgacaattttgccacgattatcaaggcggtcgcgaacggaagaaatgtctacaagaatattaaaaatgcaatcctgtttttactttccggaaatatggcaggaatattggcggtgctttacacctcgcttgcagcacttccggtcccgttccagccggtgcatcttttgtttatcaatctgctgaccgattcccttccagcgcttgccatcggtatggaaccggcggagagagatgtcctcagcgaaaaaccgcgcaatccaaaaggcggaattctggaaaggcgctttatggcgctgcttctggggcagggggcgctgattgccgtctgtaccatgatttcctttgaggtgggattgaaagagagtgcggcgctggcaagtaccatggcgtttgcgacactgacacttgcacgcttgttccacgggtttaactgcagaagccgtcactccattgtaaaaatcggattccggagaaactggtacagtctgggagcctttgcgctcggcgtgctgcttttggcacttgttctgtttgtgccggcactcaaacccctttttgaggtggagacgatgaatggcatgcagctgggctgtgtcggtgtgatggcggtgctgccgacgttcgtgatccagaatttcaaggtggtgcgtgaagtgtttgacagagaaaagtaggaagaaacagcttgtgaaaacgttaccagtcctgtatgataaggaaaaaggatacagaaaatctgacagaaagaggggcgtttggatgagacgaagaggaaagagagaactggcggcactactggcagtggcgttgcttgctggaagtgcggcgtgcggagcggatgccggggagaaagacgcggcaataggtacggcggaagcggcagccgggcaggacacggagacggcagccgggcagggcacggatgcgcaggcgggagcacaggagaacctggaagagacggcgctgtctctgatgcgggaggtaaacccggcagaagctgcaggaacggatgatctctaccggagctggtacgaggtgttcgtttacagcttctatgacggcgatggggatggcatcggagatcttccgggactgacggagaagctggactatatcaatgacggtaatccggcaacggatacagatctgggatgtgatgggatctggctgatgccggtgatgccggcgacgacttaccacaaatatgatgtgacggactactgtgcgatcgatgagcagtatggcacaatggaggatttcgagacattcgtgaacgcatgccatgagcggggaatccgcgtcatgattgattttgtgatgaatcatacttcgtcgcagcatccgtggtttcagacggcggcagagtatctgaaggatctgccggagggaatggagccggatacagaggcatgcccgtatgtggattattatcatttttccagggagaaaggcagcggatactgccagctggcagggacggactggtattatgaggcacagttctggagcgagatgccggatctgaatctggagagtgaagcggtgcggcaggagtttgatgagattacagatttctggctggaaaagggcatagatggtttccgtctggatgcggcaaaagagtatgagaccggaagcatcgactcgaacatagaaattctatcctggtttaataatatggtaaaagaaaagaagagcgatgcgtatatcgtggcagaggtgtggtcggatctggagacatacgcacagtattaccagagcggaattgacagcagctttgactttacgtttgcagacaaggacggtgtgattgcgaaggcggtcaagggaacgagcggtgcctcttcttacggaaaagcgatcgtgcggctgcaggacgcgctgggaacttacagtgacagctatatcgatgcgccgttttacaccaaccatgatatgggaaggggcgcagggtattactccggcgatactatggaggcgcagaccaaactggcgcaggcgatgaatcttctgatgtccggaagcagcttcttatattatggagaagaactgggaatgaaaggcgccggaaaagatgagaacaagcgcgcgccgatgtactggagcaaggatgccggtgcagaggggatgtgcctcggaccgcaggatatggatgcgatcacgatgatctatgacagtcttgcggagcagcaggacgacggcaattccatctactggtatgtgaaggaggcgctgcgtctgcggaatgcctatccggagatctcgcatggaacggcagagtttcttgaaaatctgtcggatgacgcagtgtgcgtgctgcgcaagaactggcaggattcctcggtgatcgtcgtgtttaactgcacgaaggacgagcgcaccgtggatctgtcacagatatccgcagacagtgaaagcggggatttgaagctggcaggagaactgctgaccggaacccgtgcggcttcctggcaggatggaacgctgacgcttccggcgtacggtgttgccatcctgaagtagagatctgaaaaaacaaatcagccgctctgctgccggcagcatcaggagagaaaacgatcagtcgttataattcagaagaaagtccgcaaactgtaaggcggcgtctaagttctgattctgatagagaatgccgaaatagcaggaatcataatagttgtacttgtgaagccaggcattgtcggtgagctcgatcgcacagggataggaagcgacggcaccgtcctcggtcgtgtagatgagatgatcctggtagcggtccagcagttcgtcggataatacggtggacagatccataagagctccctggtcggcgtaatcgagatattcatcgccggttccgaaaaagagatcctgcccgccggctgccagcatcagcgtcagcacctgcgtgtcgttgtaggacgtggaatactcgccgtccgagaactgtaaggacgatgtgagggagacggaatcttccttcgggtcgtagccgcaggcttcgagaaattcatcgaagcccttgctgtcggcggttatggaatcgttgcagttcatcatgatgacgtttaacagcgggtcgcggtaggtcgcgtaatgatagatgaggtaaatgacaaagcagagcgcagcgatcgcagcggcgatcggccacttgtaataatcccagacatactgcactttcgccttgcgggaaagtgaatgaaaatcagcctttttctccataatggtactccgtttctaaaatgaactagtacaagaataacatagaaatggaaggttaaaaaggaaaaaagaatgaaaaaattataaaaaaacagagcagtgagagaatctctccatctgctctgttctttttcgctctccaattaagaaaagcgggtgatgggaatcgaacccacgtatccagcttggaaggctggtgttctaccattgaactacacccgcatgaagtgcccagttccggaatcgaaccagagacacgaggattttcagtcctctgctctaccaactgagctaactgggcgtctcacagaaatttattttacaggaaagccattaggatgtcaagaaaaaagttttgtaagaatcttaaatttttgaaaaataaacacaaaaggtcttttcgggaaaagggatacatgctaaaatatagcacagtgagcagtttttggaaggaagaggcgcaggcgggatactgcgcggaaagaggttttacatgcacgagaaattagtgattgttccgagaaagaaatctacggtgaagaagattttaaacgtggtatggtttgtgctggcatgcctgtgctttttatttgcgatgtgggtgccgattttatttgcggtgccggcaattatttttgccatcatctggtattttcaggcattccgctctgatattgagtatgagtacacctattatgacggagagttccgtttcgcgagaatcaaggcgaagcgcaagagaaaggggcttggaagagtccagatggaagatgtccttgcactggcaccgaagggtgacagaagtgtatacaagtacgagaatgacaattcacttgcctgtaaggatctgacttccggcgagagcggcacgaagatctatgagcttgtttttaaaggggaaaagggaatcaaccgctatgaatttgaaccggatgaggagatgctcgacgcagtcatggtgaagtatccgcgtgcggtcataaagtagaaaacaaaaaaggtggcccggatcggtaaagcgatcgggacacctttttatatcatatatgatgaatcaggacagatccgtggatcagtcttcaatgaaacgcatccggctgtctgagatatcctcacgggcagaggagtgaatggagacatccttctggcgcatgcatttggcacataaagtcccgaaagcgatcggtgcgccgcatctggtgcagtgcatggtaatcgtgttcagatggtcatccttgtactcaatgcgcccctcgcggatccactttttgacctgcatatgcgggatgtggaagtgctgtgcgacatcgtattcatttacatcgttctcacggatgtactctttgacttcgcggaagagcttctgctcgatacacgacgggcagagattctctttatatgtcaatggaagcggtcgtttgcattcttcacaatatttatagttcccaaataaatcctgtggttgttccatcgtctgtcacctccggtagtatgctgccacatccgtccgccgcatgcaggcatgggcgttcgtctttactccatgttcactgtttatagattcattataccatgaacgacggtgaatgaaaactttttatcacgtagaaaagaaaagaaacttagcagaagcttagcggggaggaaacgatttgaaactgtttcatttgtcggatcttcatataggaaaacagctgcatcactacaatctcgcggcagagcagcgcaagacactggcgcagattgtggcgcttgcaaaaagcgagcacccggatgccatcctgattgcgggagatatttacgacacgccggtgccttcggcggaggcagtgtctgtctttgatgcgtttctgtcagcattatgcgagatagagccgcagattgcagtcatgatcattgcggggaatcatgacagtgccagaagaattgattttgccagcagtattcttgcaaagcatgaggtgtatatcacgggacttccgccgatgcaggagggggagacgatccgccgcgtgacgcttgcggacggatacggtgaggtggatttttatctgcttccgtttgtgaagccgggttatgtgagaaagctgtttgacgaggaaataaaaggctatgacatggcggtaaggcgcctgattgagcgcgaggagatagatccggcgcgaagatgcgtgatcctgtcacaccagttttatacggcgggcggaaaggagcctgcgacctgtgactccgaaatccactatgtcggtggcgttgaaaatgtcgatgccggcgtgcttgcgccgttcgactatgctgcattgggacatatccaccgcgcacagcatataggagcggaaaaataccgctattgcggggcgccgtttccgtattccatcagcgaggcgggggaggagaagagcgtgacggtcgtggaactgggagaaaagggacagccgcctgtgatccggcagattccgcttccgccggtgcgggaggtaaaaaagctgaccgggacgctgcatgagattttggagcaggcgggggaggaggtctgccacgcatttgtgagcatcaccctcacggatgatgtggaagcgttccagccgaaggagcgtctggaggaaaaatacgaccacatcctggagatacggatcgacaacgcgcggacgaggaagctgttgtcggacacggaagagcagcttgccgaagtgcggccggaggaggcgtttgccatgtttttttcggagatgaatgggagagagatgacgcctgaggagcgggaactgatgcgtcaggtgattgcgcaggaaatggagggggacgaatgaagcctgaaaaactcatcctgtcggcgttcggatcgtatgcgggacgcacggagattgattttacggcacagacgggcggactgttcctgatcacgggggataccggcgccggtaagactacgatttttgatgccatcacctatgcactgtacggggaggcgagcggcggaggcaaaagcggagccatgatgcggagccagtatgccaaaagcgtgacggagacctatgtggaattcttttttttgtatgcgggcgaggcgtaccgcgtgcggagaaatccggaatataagatcgtaaaagaattgaaaaacggaaaattgcgggagcagaaggttccggcaggcgtggaactgacgctgccggacggaacggtgtatccggaaaaaaggagccagaccgatgcgaagatcgaagagctgatcgggctgtcgaaggaacagttcacacagaccgccatgatcgcgcagggggattttttaaaacttctgtatgcaaagtcggacgaccggaaaaaaattttctccaaattatttcacacggacgcatactggagaatccaggagaacttaaagcggcgttcattcgagatggaccgggtgcttgcggaaaatgagcgggctgccgagcaggagagggcgcgcgtgattctgccgcgcgaagaactgaaagaacttccgcttccggaagcggtggagcagatcggtacttgggagaaggagctgaccgcttcgcaggagaccgtgcgggaggagatccggagactgactgcggcaatctctaaggcgaaggaagtcaatgaactgtttgagggattaagagcctgtgaacagcaggtacagaagctgaaggaagaagagcccgtggaagcgcgccgaaaagaacagctggaggcggcagtacgtgcggagagggtgcatgtgaaggaattgcgctgcaatgagcgtctggatgagcggcggcagtccgacgagacggtggagcggatgaagagccttatcgcggaggaaaaggaagcacatggcaggcaggagcaggactttaatacgcttaagatgcagagcgccgatgcggcggaagccgacgcggagaaaatgctccgcatccgggaacagcttccggtgtatgagcgcctgggagaggcagtagagcgggaacagcaggcaaagcaggcgtacgagtcggcgaagcagtattatgagcgtgcggtgcgggaaggcgccagccggctgcttgcggaaaaaaacaggcagcttttactggaggaaaagtatgtcagtgccgcaaaagcatgggagcgggcgtccgcccggtccacggaggcgtctgcggaatatgagcgcgtgtaccagctttttttgaaggaacaggcgggcattctggcacagaatctgcgggaggcagagccttgtccggtctgcggctccctgacacatccgcatccggcgtcccttgctgagaatgcgatcagcgaagcggcggtaaaggcggcgaaggaacagcgggagcaggcggagacggcgcgcgatacggcgtatcaggaatttgaccggcagaaaagcgcggcggcagagcaggagctgcgtctggagcaggcgaagcagcagtttctggcgcttgcgggagatgcgtgcggcgacggagagaaagaactttatacgtttgccgcactgcaggcggcagaagaacctgcagcaaaaaagaggtctctgacagagcgtggacggcaggcggagcgattttcacgggaggggaaaaaacatcccggggaaacgggagaggcggtggaccgcctgaagcttgagtcgctcaagcgcgactgggaagagggccagcgggaaacggcacggatccgcgcggagttatcctatgagacgaaagagcgggcgaaggaagcgctgcagcagctgacggatgaggcagaccggcgtacgaagcgccttgctgatgcagaggaaacactgcaaaagaaaaaggaagacatttccagacaagagggaatgctgacgcaggagcagacgaagaatgccggatttgtgcaggagtgtctggaattggagaaagaataccggcaggcgctgcgtgatgccggattttcttcggaggaggcataccacgaagcattccttacagagagcgggcgggagacgctcgtgcagcagtccgaggcatacgtccggaatcgcgtggaaagtgagggcaggcttctgactatgcagaagctgaccgagggaaagcaggagatcgggatcttggcatgggagacggaactggaggcgcaaaaacagcgccagcaggagcttcacgaggagattcttgcaatgcacaccgcatacgagacggatgcgaaagtggtggagcggtgcagggaatatttcgccgcacacgagcggctcgatgcggaaaatcaggtgctgaaaagactatactgcacggcggacgggcgtctggcgggctcggcgaagattgattttgagacgtatgtgcagcgccggtatttccggcaggtgatctacgaggcgaacagacggctattgacgatgagcggacatcagtttatgctaaaactaaaagagacggaaaacagcggacgcaaatccaacgaaggtctggatctgtcggtgtacagtctggtcacggacagtgagcgcgatatccgtaccttatccggcggcgagtcgtttctggcagcgcttgccatggcgctgggactttcggatattgccatccgcaaggcgggtgccgtgcatctggacatgatgtttatcgatgagggattcggtacactggatgcgcagtccagaaaacaggcgattgaagtattgtcacagcttgcgggaagcgagcgcctggtgggaatcatctcccatgtgacagaattaaaagaacagatagaacacagactttatgtcacgcgcacggagaacggaagcgaggcagtctgggaggaatagcagtggaaaagtatgaaaacagacaggaatgtccgatcggtgtgtttgattcgggagtcggaggaattagtgtgctgcgggaactggtggcacagatgccgaatgagaattatatcttttttggggattctaagaatgcgccctacggtacaaagacgctggaggaagtgcagaagctgacctgtgcggatgccgaatatctgctgtcacgcggcgtaaaggcgctcgtggtggcatgcaacacggcgacaagcgcggccatccggatccttcgggaaaaatatgcggatatgccggtgatcggaattgagccggcactaaagccggcggtgcacgcgggcggtcacccgcgcgttcttgtcatggcaacgccgatgaccctgcgcgaggagaagtttcatgccctgatgcagcggtttgagtcggatgccgagatcttaaggctgccgtgcccgggactggtggagtatgtggagcagggcgtgctggagggcgcagaactcgaagcgtttcttgcaaatctgtttgaaccgtaccaaagccatccggtggattgtgtcgtgcttggctgcacgcattatccgtttgtgcgggagacaatccagaagcttctcggagccggagtgcagatctttgacggcggagcggggaccgcgcgggagacagaacgcaggcttaaggattgcggtctgtgcagtggcagagcgcagcaaggaaccgtggaattgtgcaacagtcttgcgtcggagcagatgaaacagctggagatccggctgctccagtcgggcacggtgcaggcaattataaaaaaatagaaataaaatattaaagaaatctaaataacattgaacgtttttttagaaagctttatgaaaatcgacatacttcggacacattttttccgtatactaacatcatcgaaaggagctgaggacggtttcccagagcttcgttcccagcagctcagagatgtggaataaaggtcatatttctgcagaacctttcggtgaagattcctttatatagattaacattttcataactaaactcctcgaaaaacccccgggacagagatgccccgggggtttttcattggggggaacatataaagaatgtaaaatgcagtttttatatgttgaacttactatatttgtgatataatgtcgctccctgtgaggggagtgtgggttgaaatatcgctaataatatagaagggatagcatggctgtgtttcgtactctgcgaagaaaacacgtttgtatctaccacttctggccaaagtcgcaactattacatcttcgagatagcgaaaaatactaaaaaactatccctcttcactacgtaatagggggggacgaaataatagctttgatgtgacttggttttgctggtgcatttatcaacatcaagagttttgcacatgagacagatatgtcgaagaagcaaaggtaaagtagttgaaattgtggacacacaataatgaaatatatattccatgcgaacgaaatcttctgtaaaatcccccgaaaatctgttgaaaattcctaaaaaatgttattattttgatgttttttcttgaaaaacgccacttacattttgtgagataaagcgttagaatagctatgctataagaatactttatacatatttaataatttattaacagaaagggagtatagatatggaatcgtattcatttttactgttcttggcgatcattatgatctcaaccaagattctgggtttatttacccgtaagattcatatgccggcggttgtcggtgcattagttgcaggtgtgatcttaggaccgtcctgtctgaacttgattacattgaccggagataccggcgtctttcttgagcagatggcagagctcggtgttatcctcctgatgtttaacgcaggactggagacggatctgtccgaacttaagaaaaatggtgtggcatctttcgtaacagcattgatcggtgtgattgttccgttgattggtggattcctggggtatgcatttttcttccacacagacttcagcgattacgatgaggtgttaaaggcagtgttcgtcggtgttgtactgacagcaacatctgtaagtatcacagttgagacgctgcgtgagatgggcaagctgaaaggaaaagtcggaacgacaatccttggcgcagctgttatcgatgatatcatcggtattatcgtactcacaatcgtaaccagcttaaaggataccagcgtaagcccgatcacagttgtgttaaagattgtactgtatttcgtatttattgcagtattgatcttcgtgcttacaaagttaaaggtatttgtggaagagcaggatgagaagagaagaaccgctatcatctgtgtagcgctctgcttcattctttcctatatctcagaggaatacttcggtattgcagatattaccggtgcttacttcgcaggactgatgctctgcacgatgaaagttggaccgtatgttgcaagaagatgcgagatcccgtcttacctgattttctcaccggtattctttgccagtgtaggtcttaaggtaacactcggcggaatggatgccagcatctggatcttcgcaatcattctgcttgttatcgccatcttaagcaaggttgtcggatgcggactgggtgcaaagatatgcggatgtaccggaaaggaagcgttccaggtcggtatcggtatgatttcccgaggtgaggttgcactgattgtggcgcagaagggatatgcaagcggtatgttagatgatgtcctgtttgctccgatcgttctcgttgttattgtaacgacgctgatcaccccgattctcttaaagcttgtcatgaaagacaatgattctgagaaagctgctgcataggggcatagaacagatattataaaatcaggatttaagaagccgtcacttttgtggcggtttcttttttcactctataggctatgtgagtttattgcttcttttgcaaaaaacagttagaatagacacagaaaaaagaaatgaggagattgcaatgttacaggatctgcaggaaatatcagatggaaaaatatatggctgcaatgatatggttcgggcggcgtgcggagactgcgcgggatgccatgcctgctgtgagaaaatggggacatccattgtgcttgatccctgtgatatatggcgtctgacgaccgtgaccgggaaaaattttgagcagctgcttgccgatacgatagagctgcaggtagtggacggcgtgattcttccgaacctgaggatggacggagaaaaagagcagtgtgtgttcttgaatgaacagggaagatgcaggatccacgcaatgcgtccagggttgtgtcgggtatttccgcttggcagaatctatgaggaagacagaatccgctattttctgcagatggatgcctgtcagaagcccgggcgcagcaaagtgaaggttggaaaatggctcgatactccgcagatggaacgatacgaacggtttctgctggactggcatggcttgcggaaacagttggagaagcagatgaaagacggaattggtgaacaggaggcaaagacgatcaacatgtttttgttaaatctgttttttataaaaccatatgaaccggagcaggacttctatgaacagtatgaggagagaagagcgatggccggtcaggcagggttaaaataaactgcggataatgtatggcaggagatggaagtatgataatcgacagaggattggatcagaaagggacagatgagaatattggaaccagccgcgttaatctcacgcagcgttatgtggaatccgtcaaatacaacggtctgggggattttaccgaagaattgcgtgaggaagcagactaccggaagcgcattgaaaagattttctcggaaattcatatgaccggggagacgtatgcggatctacagccagaggcattgatggaagcctactggcagggggaggaaatgatatcgcgttactactgggcaaagaggcgggacacggacgacattatctgggtgcgtgtggacgtgaggattgtaccgcagctggatacgggagatttgtttgccttttacaataactgggatgtcacgcatgagaaaaaccgtgaccgtatgatgcagctgatcattgagttcgactatgattatgtggaatacatctgtctgcagaatggtcatttcgagattatggcgcaggaaaaaagttccatgtgtccgagcgccagaggaacagactacgatgcggatatccgtgattatcttacaagagtcgcagtgacggatcagctggaagcacacatccgggcaatgcagacagaggaaatccgtcgtaaccttgaggcagagccactttacatacaggaaattgatgtgagagagtctgatggctcagtgcggcgtaaaatgatccgttatacctatatggataagcagatggggacggtattcaaaagctgtgtggacatcgaagacatcgtaacggaggagaagaagaagcaggaacgtctggagcgggcaattgaagaaacggagcgggcgaattgcgccaagagtgaattcctggcccatatgagtcatgacatccggacgcctatgaatgcgattatcggcatgacatccgttgcaaggcaggaatgtcaggatgagatgatctgtggatatctggataagattaaatcctcaagtgagtttctgctcggactgatcaacgatatgctggatatttcacgcatagagagcggcaatctgaacctgaagtcggagcagatgagcagagagatgtttggaacggcaatcaataccaccatcggcccgctgatggagcagaaaaacattacgttccggtgtgatctgcagcatatggaagaaatgatatacactgatgcggtgcggttcaagcagatttttttcaatctgctgtccaatgcagcaaaatacacgccggagggcggaaatgtgtggcttctgaccgaaaggctccgcacggaaggaaacgttgaatgggttcgctttacggtgcgggatagtggaatcggtatgagtgaggaatttctggagcatgcgtttgaaccgttttcgcaggaggggaaccgtacgcttgccctgcaatggcagggaaccggtcttggacttgcgatcgtaaagaaactggtggtcatgatgcacggcacgattgaaattcacagtaaattaggagagggtaccggggtaatcctcgatctgccgcttacgatctcgggcgtcgatgctccggaaaaaatgccacaggcagtcatggcaaaacagaacctggaaggcagacgggtgcttctggcagaggacaatgagatcaatacttttgtggccagacgtattctggaatcaaagggaattattgtggaacatgcggaaaatggaaaaagagcggtggaaatggtggagcagaatccggagggatattttgacgcaatcgtgatggatatccggatgccggtgatgagcggactggaggcagccagacagatccgggcaatgagccggacggatgcacagactgtgcccataattgccatgacggccaatgcctatgaggaagatgtcagccagtcgttggcggccgggatgaacgctcatcttgcaaagccgatcgaaccgcaggtgattctggatacacttgcggggtatataggcagtaagaactagaaagttgcactgtaaatagaaaaagaaaggcatgcatttcgtcggaatgtcgatgtaaaagttgtgatactgttgctataataagttccgatgagaggagacggcaggatgaagcatttgagacaatttttgattattttacttttttcatttcttggagaaggattaaaggcattgcttccacttccggtaccggcaagcatctatggactggtattgctgtttgcagcactggagcttggaataataaaactctctgcagtggaagatgcagggaaatttttgatagagatcatgccggtgatgtttattccggcgggggcgggactggtcgagtcctggagcgccttaaagccgatctgtgtgcaggtggttgtgattatgtttgtatccacgattgtggttatggtgatttcgggaagagtgacacaatttgtaattcgcagaaacagaaaggcataaggcaatgaaggaatttttaaatcagtctgtattttttggcgtagcaatcagcgtattgacctatgaactgggtgtatttttaaaaaagaagctgaaatggccgatatgtaatccacttttaatttcgatcgttgcggtgatcgtttttctggccgcgtttgatattccttacgagagttataacgcgggagcaaaatatctgagctatcttctgacgccggcaacggtctgcctggcgatcccactctacgagcaggtggaacttttgaaaaaacattccaaggcaatcgtgcttggattgatctccggtgtgattacgagtcttgtgtgtgtgcttgtactggcactgttgtttcattttgatcatgcgcagtatgtgacgcttctgccgaaatccatcacgaccgcgatcggcatgggaatatcggaggagcttggcggttatgtgaccatcacggttgctgtgattattattaccggagtgattggcaatatgctggcggagacggtctgccgtatatttaagattgaggagccggtggcaaagggaattgcaatcggagcgtcatcccatgcggttggtacagtcaaggcgatggagataggagagatcgaaggtgcgatgagcagtcttgccattgcggttgcgggacttctgacagttgtgctggcaccggtatttgcaggaattatgtagcacgcggtctgcctgccctatatgcagatcattatgcaccaggatcttatatctgacataagataaagagagaaaacaaagaagtggaatctttatgtattgtcagaatagaatggtacacaccgtgcaggagggggattcactgtatcgccttgcgagacagtaccacacaaccgtcacggaactgatactcggaaatccgggggtaaacccctacaacctgcaggtaggaatgaagctctatgtctgcccgggggaaagctacgtaccgccccagggaggcagcgcaaacaccgggaacacgggaaacagcggaagcaccgggaacaccggtaatgctggaaatggtggaaataccagtaatgccggcgtgggcggaaacatcggtatcggagtggtgattccgggtggacagcgcccgggtggaaatcagacagcgggagagaggcagaattcagtgaatcagctgtttgagacaatgcgtctggcgtggctggaactgatctactggacacggatgtatatgatgagtgtggattccggggcagatgcaaaagagcagtatgcagtggagggacgcctgttggaaactgcagatgcaatcacggatgtttttgcagagcggctgccggtagctgtcacaagacagctgcgcaatctgctcgtggaacatgtggagatgacggggcagatcatccgcacgttaaaatccggggataaggagaattatgaacagcagatccgggagtggtatgctaatgcgaatcagatcgcaacacttctcactgaccagaatccctactttgcaggaaaagagacgaggaatcttctgttgaattatctggatatgacgcgcgagattatagaacatcagatgaacggtgagtatgaccagagcattgataccttccgggatttaagtgatctggtgctggaactcgctgattatctcgcaagaggacttctggcgcgctgatgtgctttgcaaacgggcggtgcctcttgtgcatcgcctttctggtactatttgcggcgctgctgatcctggcagtagtgcacagagtgcgggcgaagaaaaaagttcttgcattgactcccggggaacgggtgcggctgctcaatgaactggcggaaccctttggatttgcttatctgccgtcggaagatatttttacctcaaggctggatgcctggcagcgtgacaagggatatgaggcgaaatatgataccatggcggtgggtgccgggatggtgattgacgcatttcccgtgtactttaattatgagggaagaacctggctggtggaattctggaagggacagtacgggatcaacaccggcggagaggtcggaatttaccatgcgaagggcgtgattccgccgcacgcctatcacacggcgcattttgaagcggtatcggatgcagaactcccgagaatctgcagctgtctggacacggcagaggaaacgttttatgaaatctgtgccagacactggtggctcaccggctttcggatgggcgtgtatacaaaaccgtcgcgcctcagacttgccacgacgctgattttcccagagcaggagatggcgctggcgttctgggaaggtctccgcaaaaccggaaaaccgcgcagcctttttcgcatctgcggaagagaagtcagtgtgcggatgaatttttcggaggaacacggattgattccgggaatctacagaagcgcggtgcttctctggaacaggctgctgtgcagaggatttaggatcgtgacatacccgtggaaacggacggcggacagaatggtatttctatattatctgcttccgggatggtttcggaagattctggtgctttcgggcgggcgatgcaaaccgcgccgcagaaacaggaaaccgcacagatcatgtcggggcaggtgaaaacatgggatgttatcgaaggattgacagggcattggaacatgccctgcacctttcgcttggcacgggcagccgctatgtggtgatcagtgactgccacagaggggaagggacaacaaatgacaatttcctgaaaaacgcgtacctgtacgaggcggcgatggaacattatataaagagaggattcttctatctggaactgggggacggggaggaactctgggaaaaccgctgcatggaccggattgtgcactatcacgagaccgtgtatgagatgtttgcttgtctgcaaagccggaatgcgctgtgccgcatctatggaaaccacaatatggagctgagaaaaatcctgccggaggcgattatattagataattgcgagggcggaagggatgtctgcatgattcacgggcatcaggcggatttttttaattctgtgtgctggaggctctccagagctctggtgcgctacgtgtggaaaccgttggagcgctccggcgtgaatgatcccacgagtgcggcgcgcaattataaaaaggcggtccggtatgaacagtgcctggcgggctggaccagacttcacgaccgttatctgattgccggccattcacacagaccgagactgccggaaaacggggagctgtatctgaatgcgggaagctgtgtgcatcccgggtgcatcactgccatcgaactggaacagatgcagatgacgcttgtgaaatggaaggtggcgacgcgcccggacatgaccatgtatgtggtacgtgagaagcttgccggaccggttgccattttgtaggaaaaacgcgatttttcaaaaaaatcatttgacggaaccgccatttatgataatatatatatcgttatattaaatcgttaaagcgaggacggaagcgtccctgacgatagctggtaattggaggagcagaaaaatgattaaagttgtgaagtttggcggtagctctctggcaagtgcggaacagtttgcaaaagtggggaagatcattcaggcggataaggaaagacgttatgtagtgccgagtgccccgggaaaacgcaatgccaaggacaccaaggtcacagatatgttatatgcctgttatgcgctggtggaggcggaggaggatttccgcgtgccgctgatgaagatcaaggaccgctatgacacaattatcaatggactgaatctgaagctgtcactggaggaagaattcaaaaagatcagtgagaactttaaaaataaagcgggggttgactatgcggcgtcccgcggcgaatatctgaacggtattattatggcgaattaccttggctacgagtttgtggatgcggcagaggtgatttccttcgaggaggacggaacttttgacgcggagaagaccaacaaggtgctggcagagcgtctggagaaatgcgagcgtgcggtaattccgggattctacggggcactgccggacggaacgatcaagaccttttccagaggcggttccgacatcacgggatccatcgtggcgcgtgcggtacatgccacctgctatgagaactggacggatgtgtcgggctttctcattgcagatccgcgcatcattaaggatccgcagccgatcaagacgatcacataccgtgagctgcgcgagctttcctatatgggcgccagcgtgcttcatgaggacgcagtgttcccggtgagaaaagcaggaattccgatcaacatccgcaataccaacgcgccggatgacgagggaacctggatcgtggagagcacctgccatcagtcaaaatacaccattaccggtattgccggcaaaaaaggttttgtttccgtcaatattgataaggatatgatgaattccgaggttggattcgggagaaaagtattgtccgcgtttgaggagaataatatctcattcgagcatatgccgtctggcatcgacacgatgacaatcttcgttcaccagccggaattcgagggcaaggagcaggcagtgatctcagcaattcaccgtctggcaaagccggacagtatcgagctggagggtgatctggcgctgatcgcggttgtgggacgcggcatgaagtcgaccagaggaacggcaggccgtatcttctcggcactggcacatgcaaacatcaacgtcaagatgatcgatcagggatcttctgagcttaacattattatcggtgtgagcaatgcggattttgaaccggcaatccgtgcgatctatgacattttcgtggagacccagctttaagattaagatatgaagaacaacaagcacgagcaaaatgaattacagcgtatgatggaaggcagggctgcccgcatgattgcggctgcagtcactgtctttttgtgcgtactgacattgtttgaatttgttgcgctcaagatggagtggaatgtgcctgcactggcggtgctaagcggcgacaacggactgtggaccagggagtaccagcgggaagaactggtgatggacggcagcacggaaaacattctgctcgcagacgatggagagacaccgctcacaggaagtggtgagaatgccaaaacgaatgtgggggaaaacggaagcggcgggacggcgcagaccggtgaaaatgcagggaacggggaagacttgcaggtggaagggacagaagcggtgcggcaggaagagactgagacgccggatgtaagcggaaccggaaaagcggaagcggatgttaaggagacgcagacaccggaattttcgtattatatccgcatcaatcgcaagcagaactgcgtcacgatctacacccaggatgaggagggggagtatacggtaccctataaggcaatggtatgctcgaccggactttacaacgcaacgccgcgcggaacttaccagatttccaccaagtatctgtggcgggaactctatggcggtgtgtatgggcagtacgcgacgcggattcacgggggaatcctgttccattctgtgccctattacaagcgcgcaaaggatacactctgtacggacaagtataacaagctgggacagcaggcgtcgatgggctgcgtaagactgacggtggaggatgcaaaatggattgcggagaactgcccggaaggcactacggttgaaatatacgacggggaagacccggggccgctcgggaaaccggaggcacaaaaactggataaatcagatccggactgccactgggatccgactgatccggatgaggaaaatccctggcagcagacggagacgtccgtgacggagagcgagcaggaaaaacagataaaatagaaaaaatagaacgacgaaggcgacatcctattcatttgaatcgatgtcgccttctaaactatctcgtccatgggactgtacctctcttttctttttttgctctctctttcggacttcttcgtttccttcgtacctttgtatcactcttcttatgacggtggatatcgcatcatatctgattaactcatctgatactgattcctctttccatgatttggattgtcacgtgtgtttttcgggagttagaaaaaaacgaatgcaattacgttttcggtggtctgtacctctctttccttaatatcgttttgagtaaatcgttacgtttctggtggcttgtaccttcctttccttcgatttcgttttcctttctttttgttgtctttattctatctgatatatgagaaaaagtcaagcataaaatgagaaaattataataaaaaatatttaaaaacaataaacaaagaataaacacaaaaatattctgaaaatatagatgcaatagatataatatatatttttcgtaaaatacatgtaaatgcttcgctgtggcagaagagtgcgcgtttcatataataaagagaagggagcgtaattctatgaatagacagaccatacttctcatcagtgacatgcgtcaggtctatctggcggagattatgaccaaaagaggactcaacgtacgctgcctggatatcagaaacagcgggacggtaaaagaacagctcgagaagttgaaaagttttctggcggaggcggatatgctgatcctcccgattccggtgacaaagataccggaacagaaaatgctgaacgatatattgaataaaaacctgacgaacgatacgctggtgcttggaggctgcttctccacagaacagcaggaacttttggagcgcagggacattcactatctggattttatgaaagatgagattgtgacggaagaaaatgctgtggcgacggcggagggcgtgatcgcggagcttgtgaaccacagcccttataacatcgaggaggcgaaaattatcgtcaccggttacggctgctgcggcagagcggtggctgcgaggttgaaagcgctcggcgcgcgcgtgacggtgctggcaagaagacgggaagtgcgcaaatttgccaaaaaggatggattttatgccgcggattttgcgtttggaccggaggaagcgatgggggcggcaatgctggtcaacacggttccggcacctgtggttacaggtgcgatcattcacgaactgccgcgggatgcatatattttagacatcgcgtccaaaccgggcggtacggattttgcctgcgccagagagtgcggcatccgtgcggatctggcacttggacttccgggaaaatatgcgccgaaggagagcgcctatattctggaccgggcggtggagagattcgtgcgaaaggagcatgaaatgtgatggatttttccaattataatatcgggcttggaattaccggttcgttttgtacgtttgcgaaagcaagaaaagaaatacagcggctgtgcgatatgggcgccaatgtggtgccggttttttcatttaatgcgcagacgtgtgacacgcggttcggaagtgcgaaagattatgtggacggaatctgcgagattaccggaaatgagggcatccgtaccatctgtgcggcggagccgatcggaccgaataattttctggacatcatggtcattgcgccctgcaccggaaatacggcggcaaaactctgcaacggaatcacggatacgccggtgctgatggcgaccaaagcgcatatgcgcaacggtaagccgcttgtgattgccatctcgacgaacgatgcgctcggcgccagctttaagaatatcggaatgctcatgaatatgaaaaatatttatttcgttccgttcgggcaggacaactgcaagagcaagccgaactccatgatcgcaaaaatggagctcctgccggacacaatcgaggcggcgctcgccggcaagcagatccagccgattctgcagaccccgacgtaacgcagatcagacggagccgggcggaggcagcgacgaaaaatgccggcgacgttttattatgcagaaaatcagagcatcttattgttccggctgcttctggcaggggcggattttgcgattagaaatgccgcctccgttacagccggaacattgagcgctcggtttctactcctgcaacttagtccacaaaaatcaatacgcctgtcccgggacaggcgcgttttgcgtttacaggtgtttccttacgcctgcttggatgcctcgtaggcttcgcgacaggccttagccagctgatcgccgcaggaagtcgggcgtccgttgcaggagatgccgccgattttctcctcaacctgctcgacggtaagaccctcgacgagcttcggaatcgcttgaagattgccgttgcagccgccggtgaactttacgttatgcacgatgttgccctccaattcaagatcaatctgtgtggaacaggtgcctctggtcttatatgtgtatgtcattttgaaatcctcctttattgaaaaaatagatcgttcagatcacttttgagtataacatggaaccggaagtgtgcaagaaaaatttgtatcaaagcggcagttaataaaaaatttacaattcttttacgcctgtttttattgtggtggtgctggaaaagtgttacaataacaatattgtgcggggtcatacccttttgcaggtgtcccgcaggagaatggattttgacacagttttgtgtaaaaacaggagtaggagctttttatgagtgcaataacgaagatcttcggaacccacagcgagcgtgagttaaagcggatttacccgcttgtcgacaaggtggaatcttaccgcgaggcgatgggagcactttccgatgaagaattaaagaacaagacgaaggaatataaggagagactggagaacggcgagacgctggacgatcttcttccggaggcatatgcgacggtgcgtgaggcggcgaagcgtgtgctcggcatggagcattatcgtgtgcagattattggtggtatcattctccaccagggacgtatcgctgagatgaagaccggtgaaggtaagactctggtatcgacactgccggcatacttaaatgcacttgagggcaagggcgtgtgcatcgtcacagtcaacgactatctggcaaagcgtgactctgagtggatgggacaggtccatgaattcctgggactgaaagtcggcgtggttttgaacgagatgacgaatgatgagcgccgggatgcttataactgtgacattacctacgtgacaaacaatgagcttggctttgattatctgcgtgataacatggtaatctataaggaacagctggtgcagcgcggactgcattttgccatcatcgatgaggtcgactcggtattgattgatgaggcgcgtacaccgctcatcatttccggacagagcggcaaatccaccagactgtatgaggcatgcgatattctggcgtgccagatgaagcgcggtgaggatatgccggagtactccaagatggatgctatcatgggcgtggagcaggaggagaccggagacttcatcgtaaacgagaaggataaggtggtcagcctgacacaggatggtgtgaagaaggttgagcagttcttcaagatagagaacctggctgatccggagaatctggagattcagcataacattattctggcgctgcgcgcacacaacctgatgttccgcgaccaggattacgtggtgaaggacgaccaggttatgatcgtcgatgagtttaccggacgtattatgccgggacgccgttattcagacggacttcatcaggcgattgaggcgaaggagcatgtgaaggtcaagagagagagcaagactctggcaacgatcacattccagaacttctttaacaagtttgagaagaaagcaggtatgaccggtactgcattgacggaggagaaggagttccgcgacatctacggcatggacgtcgtcgagatcccgaccaaccgcccgatcgcccgtatcgatcatcatgatgttgtatacaagacaaagaatgaaaaatacaaggcggttgtggaggaagtggtaaaatcccatgaaaagggacagccggtacttgtcggtaccatcaatatcgatacttccgagctgatcagcggcatgctgaagcgcgagggaattccgcatacggtattgaacgcaaagttccatgaaaaagaggctgagattgtagccggtgccggacagcatggagcggtgacgatcgcgaccaacatggcaggacgtggtaccgatattaagctggatgatgagtcgaaggctgcaggcggtttgaagatcatcggtacagagcgtcatgaatccagacgtattgataaccagctgcgcggtcgttccggacgtcagggagatccgggtgagtcccagttcttcatttctcttgaagacgatctgatgcgtctgttcggttctgagaagctgatggacattttcaatgcactcggtgttccggaaggtgagcagatccagcataagatgctgacatctgcgattgagaaagcgcagaagaagatcgagggcaacaacttcggtatcagaaagaatcttcttgagtatgatcaggttatgaacgatcagagagagattatctacaaggagcgccgccgcgtactggacggagagaacatgcgcgatgcgattttcaagatgatcacggatcgtgtggaaaattgtgtagatacctgtatttcttctgatattccgaaggaagagtgggatctgaatgaactgaaccagctgatcctctccatgattccgatgcaggcagtgacgccggaggacgtggacagcgttaagaataataaggaactgaagcatctgttaaaggagcgtgcagtgaagctgtatgaggcgaaggagacggagttccctgagccggagcagttccgtgaacttgaacgtgtcgttctcctgaaggtgatcgaccgcaagtggatggatcacattgatgatatggatcagcttcgtcagggtatcggactgcagtcctacggacagagagatccgcttgtcgagtacaagatggcaggatttgacatgttcgacgagatgacggcgagcattcaggaggatacgatccggctgctgtatcatgtgaagattgagcagaaggttgagcgtgagcaggtagcgaaagtgaccggaacgaacaaggatgagtctgcgacgaacacgccgaagaagcgtgctgcggcaaaggtatatccgaacgatccgtgtccgtgtggaagcggcaagaagtataagcagtgctgcggcagaaacgcagcgcagtaggagtgctgcaaacggcagaggagagagcatttcaggtagataatttttgccgggaatgctctttttgcatattttcatctgtatgcagaaaaatacatacagagtgcatttttgggtggcaatttccagaaatctgatttataattcataccaaacaggtagaatatgagacggcagactgccggacagaaggaggaacactatgtacaacgtaagaaaagtgactgaggatatcgtttgggttggagccagtgacagaagactggcgctgtttgaaaatatatttccaattccgcgcggggtatcctacaactcttatgtattattggatgagaagacggtgcttttggatacagtcgatgcgtccgtggcgggacagttttttgaaaatctggagcatgtgctcgacggacggaaactggattatctgattgtcaatcacatggaaccggatcactgtgcgatgatcggggatctggtgcgccgttacccggaagtgcaggtggtcggaaacaccaagacatttggaatgataaaacagttcttcggaacggatttcgcggagagagccgtgacggtaaaagagggagatacgcttgtaaccggtgcgcatacattgcactttgtgatggcgccgatggtacactggccggaggtaatggtaacctatgatgagaaggacaaggtgctttttgcggcggacggattcggaacgtttggcgcattgaacggcattatttttgcggatgaagtcgattttgaccgtgactggctggatgatgccagaagatattacacgaacattgtcggaaagtatggtgcatcggtgcaggcattgcttaagaaagcctccgggctggacatcgcagtgatctgcccgctccatggacccatctggcgggagaatctgggttacattcttgaaaaatatcagaagtggagcacctatgaagcagaggatcaggcagttgtgatcctgtatgcaacgatgtacggtaatacggcatcggcggcggatgcacttgcgggcagacttgcggcaaagggcgtgaagaagattgccgtttatgatgtctcgaacacccatgtgtcggagctcatcagtgagatcttccgcgcaagccatgtggtgtttgcagcaccgacttacaacggtggcatctatccggtaatggagaacctgctcgccgacatgaaagcgcttgccgtacagaacaagaccgtagcattgatggagaacggcacctgggcaccaacgacggcaaagcagatgagagaaaaactggcggaactgaaaaatgtgacgattctggatgcgcagatcaccataaaatcggcgatggcaccggagcaggaaggacagcttgaggcacttgcggatgcgatcgtagcgagcatggataagcagtaattgtgttactgactttatcattgcgttttgtgggaagcaaagactttctcatataaataacggataacaaaagaagaaatagcgcgatcgtttcaggatcgctggttgggaaaaaggcacctgtttacttgtacaaagtgatatgtacgaagtggatgggtgtcttttcctgctttataagaaaatgcattctgtggagagaactctttttataacaaaagcgaacatttgtttgcaattaaaaaaagatgtgatataatgtgcatatgcaatgagcagtgccagacgtgacggctgcgatatatgtctgcttgcaggctatatatcgcagatgttgcggatgatagggcgaatgcccgtcagtccggaaaatctatgatttttcggacgagcactgcgggtatgaacagagatggctgcgtatgcttgcatgcggcagacggatatgcgccatgtgaacgcgctcgcgagtccggggaaccggaggtttcccggacttttgccggagcgtaatatgaacgtgatatttttgaggggcttatcactgggatagaggaactttgaaatgtggacaatacaacgaatggacgaaatggatgatggagatgaggaacgcttgccgggcgagccgatgatgacagcggttacgttggaaagtgatctgggagaaatacttcaatttcaaatgcctcacaactggttgcttatgcagggattacaagaaggagaagagtggcctgaggacatcgaggaggaggattcagaagcgttaaaagcgcgggaacaggcagcgtggatggaaaattattatcatgcgttgcaggaacttgagggggaagaagagcaatgtaagcatggggcagagggataaatcggaatttgtggagagatttcttgaactttccttattttacgggctttccagccccttaaatagtgaaatgatatgaaacgcgtcgtcccgtctggtttcacatctaccgccgccgtatccaccacataaaccgttatctgcttataatacatactcccggcgctatcaacaaccgtcagattttccgtgcaacttcccgcgtgtcggaactgtgtaaaatctgctgcctggtaatccggaatcgaaaaagatgttccgttttcatggaatcccggttcaatcgggcttccgtcctcccgatctgatgcagttgcatgacttaagatctcactatctgtaataaagccctgctgtgcctgacttaacgtataataaaggtttaccgccacgatccacgggcaatcatcccacgatgcatacaatgtaatattcgcaccgttctgatccgttacacccagacgatccaccagctccgctaccgtcagctgatcccctgccagatataccggattaaaattctctttttcttcctctgtaacccagccggtattcacagacgcatacgctctctgatctgcttccggatctgtctcattatcagcagcttccagctccggatctgcttctacagcttcatcagcttcattttccgcttccggatctgttgcttcttcattcattccggcatccgtttcatcttccggcgcttccggatctgctgcttccgaatctccatcactttctaaccggatcgccccgctcaatacatcctgtgtcacattctgacatcaggcctatttcttatgcaaaaaaatcaaaaattgtgttgacatctcttaacaggtctaaaaagtccgcccattgtctgcggttgtcggacatctttcgcggattgtcaaaacgtggaaagacacggaatccgataccaaacgcggcatagaagaaatgctcccattttgcttcaaaggattcccgccgccggttggcagtccggaaccgtgcaggtacagatttttttaaatctctgcccaccacattccatgccccggtcttttaagcttctatcttagtctactctcttaatcttattgagctgtgcgttgagtccgagaagatcttctttcttccactcgaccttcggtcctgccgcacccagcaggttgatcatacggatgaccgtaaatccacccagcatttccagcatcttcggattcgccattgctgctgcaggatttccgtcatttttttcattaccctgactcattcccgctgcaacttttgacatcagtcccatgaagagtgcttttccctcttcggacttcatgatatcagaaagtctgtcattcagtgaataatatccttccggctctgtgatgtcgaaccagttgaggattgcgccgctctctttcaggctgtactcctcgttgaaggtatccaccttgcggatgtggctctcatccttatactctccggcaacagccaccagggtggattctccgacattcggtacctcaaagtggaagaaatgatcctccgcctgaagcttccctgcactcttgccgttgacaaacagctctacctccggaagattggaatatacagttaccttcgtggtatcttccacgcggtctacatagcgttttccgcacagatgtacgaacggctcatcagacagccatgccttgtatgcatagaaggaatctttcttgtacttgcggtcgaaagttaccagtcccttgtggttctgaccgttctcaccgccctcgtttctcgcatctgcaccgaaatcgaacatgttccatacatgcgttgcccagatatactttctggtgaagagctgcttgatcatctcctcatgatagtatgcctgatactcctcggtgtaatcgccctgcttcggatcagaggtatgccagttcagcgcctcacatccgtactcgctcattccaagcgggatattcgggaactctttgtggaagttgtccatccacggtccgttcatggatacgtctccgccgtaccatccgaagtaatggttgtaagagatcacatccggaatctggatgtacggatcgtgaatatcacacatggataccaccgcgatcgtggtcagtctcgtgtgatccatctcatgaaccatgtcatttaagattctgtggttctcaagcagatcctcatccgagcttcctgccatcgtgatctcgttggaaagcccccaaaccacgatactcgggtgattgtaattctgaacaaccagctctttcatctgggaaatggtattctcacgtccgttcggcatgtgagaggaaatgtacggaatctcagcccagattacaagacctctctcatcgcacagatcgtaaaaatactgatcgtgctggtagtgagccaggcggatcgttgtagcaccgagctcgcagattaagtcaatatcctctctgtgatgctccggaagcagcgcattaccgattccccatctgtcctgatgacgggatacaccgcgcagcggatattcctctccgtttaagataaatcctctctccggatcaatctcaaaggtacggcatccgaaacgtgtgcttaccgcatcaacggtctcctctccggatacaagcgccacctctgcggtgtacagatacggatctttctttccgttccacagatgaactgccggaatggaaagtacagcctttgtctcgccggctgcggtctctgtctttgcaacctctttgccctctgcatcttttacggtatatacaagcttctggtctgcagctgcattcgtcaggaatacctctacctccacgctggcatccgcgcccttgatctccggtgtcaccttaatgccaggtccgccgtagtagtccagatcaaaatgggacttatttaccgcaatgatattgacgtcacggtaaagtccgccgtagaatgtgaaatctgcattctgcggatatactctgtcgtttacgccattctccacagcgatcacaatcaggttctcttcttctgtgagctcttttgtgatgtctacacgccaggtggaatatcctccgtcgtgatgtgccactgccttgccgttcacatagacgtctgcggaagcgtttgctcctcttaactccagataatagcagtctgcctccggcagttcgctcttctttaactgttttgcataataacaggttccgcggtaataatcgttgccgccgtcctgtccgtcaatctcattccaggaatgtggaagtgttacccagtaccacttctctggcatctccttcggcacttctgtggcttccttggtaaatgcccatttcgtattaaaattgattacttctctcatgtgtcgcatccctccataaaaagtatcgtcaacattcatctgtctgcatcgtaacacagaaccgcacttttttctttagatagtttttggcaaaaatggcacaatatttagcattctacctttattttgaaaaacaagttcaattctttgcctgatatttcaggatcaatacggaaaaaaccagaatgcccacgcacggaatcagattgcagaacattccggtcacaagccccacacgatcagcaatcacaccgatcagccacggcatcacgatcgcgccaatccctgccaccggcagcatcacaccgagactcgttgcattcatctccctgccggctcccgccacggcgatcggattgacccctgccatggcgaatgcaaaggcgaacagcatggcgatggctcccgccggctgctgcatgtatacaagcccgcagtacagcacgctgcagcagccgcccatccacgcaagcgtgcgaaaaatatgatgcaccggaaaaacgaacgcgatcagaagtctggcgatcagagtcgccccccacatcaccgttaccgtgtatgccgcaaaggaacccgagaggattcccatgtctttatagtatgtcacgagccatcccgtcacactcgtctccgccgcattctggcagaataaaagcccagtaatcagccagaatttcgaatccttcaaaaatgcaaacgagatctttccccgttcgccgttcttctctttgaccgcgcccggaagtcccgccgtcaaaaatatcatccacaaaagcagccccgtcaccgccactcccaccatcggcagagtgtcgttgatttcaagaagcgacgccgcaagaaacggacacagcaacgcaccactcgcatagcaggcatgtagtatgttcatgccgcgtgtgcgatcggcactattgtcttttacaaggattgtgcaattattgagtgcccctccctttgcaaatccgaccaacagaaatgccgccatcaacacggccggcattccagtcaccgccatcagaaagtaccctaggaaataaccgctgcagagaagaagcactgtattcttcactccgattttctgcggcagaatacccgccgcaaaggacgccgccatatttccaatgctcatcagtccgagcatcgtacccgtcatgccatagtcaaattcatattttccctgcagaatacttacaataatcccgctcgatattgcgcagataccgctcaaaaagaatgtaatatagccggtgttgcgccgtcttctgccccagtccgttgtatgattcatctgtaccttctcccctataaccacttacagagagccgcaatacggctctctgtaacaatacttcctgtgttcctgctaaatgtttatctgtttttacccgcaccgaacttgtcgagaatcgaaccgtccgaaaacttacggatgtatccaatcagctcgtccgatacgctgacgatgtgcgcttttacgccatcgcactccttcaccacgccgcggagacgtcccatattatctgtggtgacctctgcgctcttcgcattctcatctgccgaagccgtaagggaagtgaccccgttctcaatgacgctcttgtgattctcaagatcgccgacctccgtgccgattccgccgatagcatctccgacctgttcgatttctcggttcaatgatttgaagatctcctccgtgtcatgaatcttctcattctgtctggaaaatgcctccgatacctgctcggtaatctgaacgctgttgcttgaattatccagcaggacattcacgacatggttaatctgctctgtggactctctggactgatccgccagtgtccggatctcctccgcgaccacagcgaatcccttaccgtgctcccctgctctggcagcctcgatgctcgcattaagggccagaaggttggtctggcttgaaattcccgcaatgatctcagtcgccgtccggatctgctgcgcggactgattcgtcagatctgtctgctttctgacattctcgatcgcaacgccgctctcctcactgatggcaatcagctcctgcataatctgctccgccgaacggttatattcacgcatggcctgcgcactcttcgtcagatcctcaatattggaagaaatatgatcgatcgacacgctgatcgcgtccaccttttccttcatatccgccgtctcagacgcctgggacaccgtattgccggtgatcgtatcgacagcatctgccgtctgatccatcgactccgacatttccgagaaaatctgctggaaatcaccggataccccttcgagctcatccacagccttgcggattcctccaagcaccagctcaatcgatgaaacggacgtctcgatggaacgcaccatctccccgatgccgtcttcacggtctgccagctttttcgccttttccgcaacttttgtattctccgatacctttccgttaatcacggatcggatctgatccagaatcgacttgatcaccatgaagattccgccgaacacggcagccacgatcacgcagatcagaatcatcgccatgactgttccgatcactccgctttccaataattttaaaatgatcagaaacgccaccagcacaatggcaagaaagccggcaagcggtgccatcactttcccccacatctcgcttttcttcgtatcttccacgtaaatccctccgctttcgtatggtaatgtataacacttgctttcattgtaccataattaccgcaaaatacaaacatcttttacggctgacccatggcaagctttgccttcacgatgcgcgtcacggattcattgatccgctcctcggtgatcgttccgtcgttcaccgcattcagaattcctgtgtaggcggtattgtaatccgccggcatcaaaatcatatctgccccggctgtaactgccagaactgccgccttgtctgaattgtagaatccggcgaccgcctccatattcatggcatccgtaatgacaattccgttataccccatctgtccgcgaagcacatcggtaatcatcaccttcgacagcgtagccggcgcattgtccccggtcacattcggagccgagatatgtccgaccatcacgaaattcacgccgccgtcaaccgcactctggaacgggacgagctcttccgccatcagttcctccagagtcttgtccgtggacaccgccccgtcatgagagtctccggaagtgccgccgtgtcccgggaaatgcttgaccgtaccgtacactcccgccgcggagagtccctgcagttcggatgtcaccattcccgcaaccgtctgcgcgtccgacccgaacgagcgctgtccgatcacctgattgtccgggttggtgagcacgtccgccaccggcgcgaaatcgacattgaatccgagcgctgcaagatagctgccgatcgtgcttcccgcattgtatgcattctgcacgtccccgctcgctccgatatcgctcatattgccgacgttcgtcaccccgaaggcatcattgccggcgatgcgcgcgacactgccaccctcttcatccacacacaaaaataccggaagtccggtgcgctccctcgcaatctcctgcatattggagagcatggtggtcgtctgctccgggtcggtgaggttgtctgccatatacacgattccgcccaccggacggctctggtaagcttcctttgtggtgtcccccgcagccgtcacaccgcttgcatatccggtcagcgcattcggcgtaatcacaaacatctgcgcgatcttgtcctcaagcgtcatctgggacacaagctgcgccgcctgctcctccaccggatcggtctgtacttctgtctgtggctgctccgttacttcctccgtcgccgcgacattctctcccggcagctcggttccgtcggcacctgcattctgtccgtctccctttggcagcaggcgtcccacaagaaatactcctcccgcgaccaacacgagcaggatcagcacgactatcacacacacaatgaccgcacttttcgtatctttctgtcttctctgacgtctctcttcctgattcatatgcttcctctttccaggtgttctctttttctatggtctgattatagcaaatcttttccggaaccggaagagctatttttcccttaagcctgcaccggcaccgtggataccaccagactcatctctccctgcatctccacatcgccgaatccgcacggtaaaataaagtgatctccctttttcaccggctggccgttgacgataccgctgccttccagtaccgacatcagcaggaatggatgattctgtgcaaaactgcatgttccgttgacatccagcttgtagatctgataatatccgcaggcgtacagctcgttcagccggttctccggcagtccgattgcagacgttacactgtcctcgacagattttgccggaacggcgatcacgtcgatgctcttctcaatgtgaagttctctcggcctgccgttctgcagtctgtcataatcgtacacacggtaggtaatatcgctgttctgctgtgtctccaggatcagaagcccgcccttgatggcgtggacggttcccggatcaatctgtataaaatctccctttttcaccggaatctcgcggataaattcgctccagcgtccctcgtggatcatggaggcaagctcctctttcgtcttcgcgttgtgaccgatcacaagcgtggcgttctcgggcgcgtccatgatgtaccagcactccgtcttgccgaaagagccgttttcatgctcctttgcataggcatcatccggatgtacctgaatgctcaaatccgccttcgcatcgatgatctttgtcaaaagtgggaagcggtcgtaggcgagttttccaaatacctccgggtgctcctcccacactttcgacagcttcatgccggcatacacgccgttcctgatactgccgtcgccgttcggatgtgcggagatgccccagcactcgccgatgtcatcaccctccaccggatagccgaactccgttctaagccgggtgccgccccagatattgtgtgtgcacaccggatctaaaaataagatttcttttgttgtctgattcattgtcaacatccttccattcgtctcgattattttctgataccagaaagcggaatccttcacaatccgcctctggcttgcaaaatccacataaacaatgccgaaccgctgcttatatccgtccgcccactcgaaattatccaggaatgtccagaggaaatagccggctacattggcgccctcatcatatgccttctgcattgccccgatataggaatccaggaaagtaatgcggttcgggtcatgtaccctgccgtcactgctcaccagatcatggcaggacatgccgttctccgtaatgtagagcggtagcggatagcgctccgtcaaaaacttaatgccgtaataaaacgcctccggcgtcaccggccagtccgatcccgtcttcgggaaccccggcgcacgatccacaaattccggctcgccgtctgcgccggcgcggacgtagtacccattatatatattctgtcccataaaatcaagcggctgatagatcagctccatatcctcctgtgtgatctccggaagatacggcgcaaattttttcagcccctcctcggggtaatgtccaaggaataccggatcggaaaaccacgatacattccaggtccagttatcgatcggattgtaaaatccgaaatacacctttttcgccgcctcaatgtcctccggccggtcggtgtacggatatgccacgccgccggtcggagcgaaaccgatcttgaccggtcggaccgcatatctgcgcaggttgatgaccgcctgcccgtgcgccatcagaagatgatgcgccaccagaaacgtctgcgccacgggaagtttcacgcccggagcatggacaccgctcagatgtccgaggccgaccacgcactgcggctcgttgatcgtaataaaatattcgcagatatcactgaaattctcggcaaccaccttcgcatattctccgaaccactgtactacgtccggattctgccagccgccccgctcataaagcgcctgcgggaattcccagtgaaacagtgtcagatacggtgtgatgccgttctccttcatcgtgagaatcatatcacggtacatggcgatcgctttctcattcacgcgcccggttccctccggcagaatccgcgcccagttcagtgaaaaacggtacgcccggatccccagatgcttcatcagcgcaatatcttctttataatgatgcatatgatcgcagcttgtgtctgcattctgatgttcaaacactctgccgtccgccgcaaacatatcccagacgcacgcgcctctgccgtccgccgcatccgttccctctacctgataggcgctgctcgcaacaccccacacaaaatcctctcgaaacattcttataacctcctgctcctgcaatcgcagtgtctctctttatcttccgacattttttctgattttgcaatccttttacacgcacattctgcaaaataggctgtctcttgccgtcagtctcttcctcttctccccgccgcaatcacggacaccagataaaacggaaccgcatcgtcctcatgcgtctctgcgagtcggatcgtgacggtatgccgcccctcttttccgtgctctaaaagcgtcgcaagttccagtttgtctccccaggtctcatcaaaatttgcatccagacgcaccgcatgctccgtatcgtcatccacgaccgccagtgcaaccggcgcgggaagctttaccgacttccggtactggacggcaatgcagctgccctccaccaaaaaggtgatggcatccccggtcttttccgccgtccagccatagcggaagcagtccgtgatcccgttctgtgcagcctcatccggcacaaagccctccatgagaggctgcggcagacctgccatatccggtgctgcggcattgcggatgcggacggaatcctcgtaggcattttttgtaagcggagccggcagctttgcccccggtgcaaaactggtattgctgccggtcagttttccgcttcgtacctgctccaaaaaataagtaatcaccgacgccaccagcgcatgcccctcatcgttcgggtgcagatcatccggtgtgatcgcacggttttcaatccgccctgccaccacctccgggtaaatagagctctgcatgctgaccgacggcagatcataatgtctgccgattgccgcgtgcatcacctgcgcgttggctccgttgtggtaaaacacgttgtgtaccagaagaaccgccggattccacgcggcgccaaggattttccgcaccagtccctcataggtctccctaaaatgctccgtgctctcatcattgacggaaaattccacaattacaaagtccggtctctccgccagaagatccgtccccacacgcgccgcgccgaactccgatgtcgtgccgccgatcccagcattgcagtagacaaactccgcctgcggaaaggtctctttccaccatgtatacacacggtaggcgtagcacgtctgcggtgtcgaggaaaggcttccctgcgtgatcgaaccgccgataaaaccgattaccagacgctccccgcgttttgcgcgcgccatgacctccttcattctactcacatctcccacatttgcaattcccttttccagatcaatctgcatattcatatttctgctccttctctctttcttttccctttattgtctctcaaacatcccagatttcatctccgagcgaacggatataggaagccagctcctccgacatctcctccgcctccggaatccggatgtgtccgggcgttccggagccgtttctccggtataaaaagtggtgcacgcgctcacttgcaatctgcccacacaccgtctcaatcgccgtatcccagttcgggtgatgttttaagatggttgtcgcaagaatgatctgcgcctttggatagtgcttcatcagtgtctcaatgaattcccggtagcgcttccgccagcgctctgccgcactgcaccctggatcctctgccatatagtccaccggatgattgtcattctgcccgatggcaaccacaaccacctgcggcgtatagcgtgaaaaattccatttctttacctctccaagatccggattatactctagcttgtcgtaacaggactccacaccgtagtatgtcggcgcaccgaaccatcccgtcccgtcaagcagcgcaatgccgccctgtgaggtatcgtgaagttctgccccaagctttcgcgccgtcatccaggcataggaataccagctgttggaatactgtccgtcgtgcaccggatcctcttttccgacatagtcgaccgcctccgacacctcgccgcacgagacactgtcaccaaacacttccatccggcgggcaggctttggctccggcggcaggagatctgcgccgtcatccacggtaaatccgtagaacgtcaccgtatggcaggcgtccatgcgcttaaacagcagcagttcatgccgcgcatccggcagctgccccgcaatctcataggttttctttttttcgtcattcaaaaggcggatgcgcccctgcaccccgtctaagagatagcccatctcattcgtccagtacgcatgatggttggcaagcgtgactgccaccgatgttccggtaaaaatcattttcacccagcttgccgcatagataagcaccggcgccttcggatcgtcgtcatcgattcttccgctgtactgtaacatcggatcgtccggctcgatattcctgaccattttttttactgtcatttcttttccccctctgccttccggcttcccgccggatacgcagcagggctgcgaaagccccgaggtgttacgcacacaatgcgtccttctcggctgccgcagccctgcattttccagttctctgttatctttttccgatctcggtatcggttgtcgtcaccacactgtgttccttgatgtaatcgatgatgtcatccagttccgtgaacgccagtcccacatagctgtctgccgctccgtaatagattgcaatctttccgctctccgaatcatggattgttgcgcacgggaagcatacgttcggcacgaatccgcgctcctcataccactcttcaggagtcagaagaaacgtctcacagcggtacttcacgatggaaggattgtcgatgtctaagatcgcaccgccgatcgagtacacatatccgttgcaggtgccgctcacaccgtggtagaacagaagccatccctcggatgtctcgatcggagctgcaccgccgccgatctttaaggactcccaccactcggaacccttgcccatcacatgacggtgttttccccagtaggtgagatccggactctcactgataaaaatatcgccgaacggtgtgtggccgctgtcggacggtctcgagagcagcatgaaattgccgccgatcttgcgcgggaacagcaccgcattccggttaaacggcaggaacggattctcgattctggtaaatgtcttaaaatccgtcgtcttcgccataccgatcgctgcgccgtagaaatcctgacaccagataatataataggtatcctccaccttcacaagtctcggatcataagcgtagaccggcatgaaggactcaccgttctcgtccacaaagttaatcttgttttcctcaaaattccagtggatggcatccttgcttcttcccagatagatatacggaattccgttcgtctgttctccgcggaagacgccgatgaactcatccccgtacggcattaccgcactgttgaagattctcgccacgcccttcaccggatttctgccgatgatcgggttctccttgtatctccataccggtgctccgtttaactccgccgggcgctcctgccatggcacattcggtactttggggctgatcattttatatttgctcataacttctacctctttctgccgccgccgcggctcatttttctatgatgaccgtatttattcattcgcttttaaaaatgcaagattcttctcgatgagaccgcaccgctgtgccacacactccaccgatcttcccggatcggacggcgtatggaatacatagtccaccagcttctccaccgtcgtggtcgccacatgcatccgtgtatccgaggatgcgtagtaaataaacacctcgtttttctcattgacgaccgctccgttggtgaataccacattgctgacatccccgacgcgctcctctcctctcggtccgatcagaagcccggacggctcggcaatcactttcgacggatcttttaagtccgttgcaaacgcatagataacataacgcagtcccgctgccgtgttgcgcacaccgtgagcgatatgaatccatcccttttccgtcttgatcggcgtcgcaccggctccgttcttcgcctccgtgatcgtatgatacttgcgcagactcgtcattttttcctcatcgatcacagcgtgtgtgatgtcctcgcagagaccgaatccgatgcctccgccgcttcccgtctcgataaaatcatccatcggtctcgtgtaaaacgcatatttgccgtcgacgaattccggatgcagcaccacgtttctctgctgcggggaacgcagcgtgacgaggttcggcaggcgctcccaggtctttaaatccttcgtgcggacgattccggctgccgccactgccgccgagagatcgctcacactcgtatcctttgactcggagcagaacacgccgtagatataaccgtcctcatgcttcgttaagcgcatatcgtagacattcgtctcctcagggcaggtatccggcagaagaatcgggtaatcccagaaacggaaaccgtcgattccgttgtcgctctccgccacgccgaagaaagactttctgtcattcccctcgatgcgcgccaccagataatatttcccgttcagctcgatcgctccggagttcatcacggcgttgatgccgagacgctccataaagtacggattggtgtccgggtttaaatcgtaccgccaggtcagcggaatatgctctcttgtgagaaccggatactcgtaacggtcaaatacgccgttataaaaatccgatttctcgtttttccgtgcaagcagtttttcctgcttttctttttctatataatatctctcatgcagcataaccaattctcctcaattttccttgatgcgtcccagtacctcaatacacatgcgcccgttgtgatacggacatttccacggctccacgatcggccggtctaaaatcgggcttccgtcctcatacacttcccagtaccactcgcttcccctgcgaggatcaatgacgtgttctttgatgaactgccactccgccaacgccgcatcccggtactccgaatgatccggcatctgttcacaggcatttaaaaatccgactactgtctccgcctgcacccaccatacacggtgtgtattgactacgcccctgtcacactcatttgccagggagtgtccgtcaaacgccgtctcataaatatgtgttgcaagcgcctgtgtgatcggaacaattttcgcctcatacgcctcatcgcccagcaccttgacgccgcggtccaaaagccacgctgtctcaatgtcatgcccgtaggaatgcagatctaaaatcgtgtgatacccggcatcgaaaaacacttcctgtctccgcttcgccggattgtatactttctctgcaaacacatccatgatccaacggaggcgctcccccacggtctcatcccgcgacacacggtacagctccgtgtacgcctcaaaaacatgaagcagggtgttcatcgtcttatctgcaagcacgccgttctccgacagcttctcgttggattccggctggaactctctggtaaaagcctccaggtatccgacctcatccgtacacttctcctcgatcagggaaaagagctgcttcgccagtgcaagcgcttcctcgtcgtgcgacgcctcatagtaggaggacaatgcatagatgcaaaacgcctggttgtaggtgtgctttgtcgtatcaagcggtgtcccgtcatagtttaatgaccagtagatgccgccgtactcccggtcgatgcagtgctctttcaaaaagacgtagccgtgttttgcttcctccaagagcgcctctccggtatagcctgcgcttctacagtcttcctccgtaaaaagtccctttcgatatgccgtgtaggcattggagaaaaaccatgtgatgcggctgtttaaaatgcatcctttttccgctttctgatccagtgcaagatcataagacagccagccgtaatagccgccgtaagtgtcgtcacgcagtgcacgccagaagggaatgatatgtgtgagaagttccgttttaacttctcctcgcatgctttctaatgtttccatcgctgttcctcttttcctgtaatcagcccttgactgcgcctgccgtaatgccgctgtagatctgcttctggaatacgataaacacgatgagtgccggcagcagggaaatgataacacctgcacagatcaggttgtactggcttccaagcggtccggtaaaggtatagagggagatcgccatcgtctttaagttttccttggtcagatacaggtttgccgaatagtattcgttgtacacgcccacgccctttaagatgcaggcggtcacaattgccggctttagcagcggaagcatgatcttccagtagatcttccagtaggacgctccgtcgatgattgccgactcatccagcgacaccggaatattttccatgtactggataaagatgtagatggagatgacatccgttcccatcatcatgatgatgtagccgtacagatgattgataaagccaagatcatgcatgatctggtagaccgttacctgcatggcaacacccggaagcagtgccgcgaataaaaacaggttgcggatcagcccgttgcccgggaactggaaacggtttaacacatacgcaagctgtgtaccgatgatgatggctccgatcaggacacagaccataacgatcacggaattcacgaatgcccttcccatgttcgcacgctggaacgcttccacaaagttgtcaaaattgaaccagttctgcggcagtgtcataacattcgtcgtcttatactcttcctccgtcttgaatgcagtgatgacgcaggaaataatgggaatcacggcgacaaaggaaaaaaacacaagcgatacatatttaaaaatgatccagataatggctcctgccgaatactgttttctgcgctttttcatttacatcgccccctttgctgcttttttcgccgctctctgttctttgtgaaactgtttcaaccgctttctctcttccctggtcatgacttcatcgtcctgatccgcattgcggtatacatatttaaagaacagtttctgtaagatcgtacatgcgaaaatgataagaagtaacacaaccgccatcgccgacgcgagtccgaccttctggctggtatgtgcaatattgttcatgttgataaaatacgttgccgttccgttggaacctccggtaattacgaacggctgctcgaatgcgctcagtgctcctgtgatggataaaatcacattcagcgtcacaatcgtcttgatgctcggcagtatgatatgtacaaactgctgaaatttatttgcaccgtccagctccgccgcctcgtacatctcggaatctacagacatgatcgctccgataaaaagcaccatgttgttgccgaaatatctccagacagaagttgcaaccagtgaccagttgttgatcttctgatcgcgcagccagtacggaagactatccagttcaaatccaaaccatccgaggatggaatcgaatacaaatcctcttgtgtaaaaatatttaaagataaatccgatcgcaataccgctgatcagatacgggaaaaacatcagtcccttaaagagattgcctccccttgtcttaaagctcaaaatcgttgcaaggaacagcgcaagcgcaagctgtaccaccgaacctaccatgtagtagaggcttaaccacagggatgcaaaaatatccttgttgcggaatacctcgatataattcttccaacccacaaatacccgtttatctaccggcgtggaatatttcattttgtaaaaactgaacttcaccatttcagcaaatggcacataggtaaatgctgccaacagcacaagcggaattatggtaaatgccagtataatcagtgtctgctgccccttcctgctttttgcccacttcaggaatccacgcctggctgttttattttctactttctttactgatgtcgccgccatatccaacctccatctttttcaccctgtttttaaaataacgggaccggaaacagatctctcattccggtcccgtctgtgcatgatgtcttatttattctgccgtcacgccattgtcttcctgtgcctgtgtccacttctcattccactcagccatgatgtcatcgtaggacatatcaccgttagaagcatgctcaatgatctcctgaaccttctcttttccgcctgcattgatgttcaatccggaatcagcgttcaatgcattgagtaaatcttcctcgccctctaatgcggactcgtcggatacaaatgtcacatcaccgaactctgcgtatgcatccggataatcgttatcgtctgcagcgatcgggataccgccctcgttgtatgcaaaaccggactcttctgtcatccattttacgaataccattgctgctgcctgatgatctgcatccgatgccgcattgataccgaagctgtagtcagcgcctgcggaagcatactgcttgccgtcgatcgtgatcgggaatggcatgtagccgatgtcctcgccgtgagaatcagcgtctaccatctgggaatatgcccaggagccaagtaccatggtcgcgatctcgcctctgttgatcatgcccttggaatcttcccaggaagttgtggtgaagtcatcctctgtcagtccgtctgccactgcatcgtagagcaccttgtacagtgcatatggatgtgtgccatcgccgtaatcctggaacggatcctttgtgtgaagaagcttctggttcatgtaagtagaatcaccggttgtcgtacctgcgatctgtccgtcccactgctccatcggccatccgtctgcgtagttcgtgtagagcggaatgatggaagaatcgtaatccttgatcgcctgcagtgccgcgatgaactcatccggtgtcttcggtgtctctgcaacgccggcctctgtgaagactctcttattgtatacaacaccctgtgcattaccggtagaaggaacaccgtataccagtccgtcgtaatcccaggtatttgcgaacttaatctgtccttccatctcatcgagtgtgccgtacggcaggaaatactcacttaagtctgccttgtcaactgccgggatcatcatgatgtcgccccagtcaccgctctgtaagcgaagcagggaatcatcggaataattggtatccgtctcaacctctacggtgatgttcgggtacatctcattgaaatcagcaatgtaagcttcccagttctttcccggatagctgtcctcggacatatcggttctctggttgaatacatggatggttgtcgtgatgtcggtgtaatcctcgcccaatttgatgcctgcgtaattcagatcgccgtctgctgcctgtgcaccgtccccactctcggttgccgtcacacttcctgttgtcgcatcatctgatgatgcgctgctgtcagatgaactgctgccgcatgctgccatgctcaaagtcattgctgcaaccaggctgactgccagaacttttttcaacttcataataaaaatcctccttttttatagctcgttttgtagcttaatttaattatatattttttctatttttagtcatcatatattattgcataatatatgattttcttgcgtttttctgcattttccacatgttatacaaattttgcatccactttttagtcatttttcatatttttagtcttttcttttcctttcttttttctcttattttaattttaattacttaatttttattattttttaacctaataatcaagaaacctattgtattgccaaatagttccgctataatataggatagttatgcagaaaggaccgattcttatggaacccatcacgatcaaggcacgcctgaatcaggcttatcatttctccggagcagccggaaacggcatccgtttttccgatctttcagacgacccggctttcgttttccgcgaggacacatcggctgtacacaaccgttttgtccctgcaggagggcgcatcagctacgcgtcccccgtccgtctgacgcaggatgcgctgccgtacctcctctttctctatgtcgaatccggaagcggcactttaacgactgccggcgacgctgtgcaggagccggaatcctgccagcttgcaccgggggatctcatgcttcttccggatcagaccgcataccggttttccacgacgcatacccctttctgctaccactgtttttatctgtccacagagtatttttcggaatatcttccgtttttgtgtgcggacgaccgcatttttcatacgaaccggaccgaggcggatgacatcgtatggcgtattctgccctacctttcccgcgagctgctctccgatgaaccagtttcctcgcttcatctgaccgccatgctctcgcttgtcctgtcctccctcgccgcttcccgccgtgccgcatcgacgccttcccttcccgcgcatgtggcacacatgaaagagattttcgacaccgattacgcacattcccactctctcgccgcgctcgagagttctctcggagtcagccgctaccggctctgccatgatttttcagactgcatcggtgttccgccaatccagtatctgaaccgggtccggctgaaagccgcacgcacgctgctgcgcacgacaaccctcaccatccgtgaggtcagcgccgccgtagggattgaaaacacgacacattttatcaatctgttcaaaaaagatgccggaatcacacctctgcaattccggcagtcttccctgcactaacccatattttttctggcttttacgctgtcctttgtgaccatatgtccctcgacgatacagattccctggcggtacggttcgcctgccattttcctgatcagcgtgtgaaccgtctgtctcgccatctccttcatatccacctcataagtggtgatcgccacatcacagagtcccgggaaaagataattgtcatatcccacaaccgatatatcctccggcacacggtatccgtgctcatgcagcctgcggatcagaaagctcgccgtcagatcacagttacatacaaaagccgtcggcatctcctttggcagctgcaacagccggtccatatcaatcttgcccgtatggatgtcgcggtctgcgatcgtccagtcccccctcaccgcaacgccgtgctccatcagggatttcgtataccccagatagcggtccgtgatggatcccgtcgcaagcagggttcccacataggcaatctccctgtgtcccatgtcgaacagataattcgtcatgcggtaagcaccgtaatagctgtccgaaatcaccgcatccgtatctgtcttctcgtcacagaaatccatatacagaagcggaatttttgctttttcattcaaaaacttcagatattctcccgtcaggcgtccgatgataatcagaccgtccgccttctgctcctgcacaagcttcggcatctcgcaggcagtctccatctgtgcgctgaccacttccatcagcgtaaaacattccttcgccaccgcgcgcgtcgccacctgctgatacatctgcagatagaaggaatcatacttatccagccagtgctcggcaatcagcacaccgatattatagctttttaccgcgtgttcgcgccgcctggcggacggctgtttgtatcccatctcatcggcaagcgtttttatcttctcccgcagttcctcactgacgcctttctgtccggacagcgccttcgatacggtaaccgtactcacgccaagctgtcccgcaatatctgccagctttaccgcttttgccattttttcatcctccaactactgttcatcaggcacctcggataagtgtatcagtgccgactggaaatctccccacatcgccggaacattcagtcccgcatgcaggagggtatctccgcagtacacttcccccgttgtctcaacacgatattttttcttctcatcaagtcccggtatccggatccgtctgctgtgcacattcggtctgccaagcacctgaacaaaggtgatcagcgcctccgactgatcctttgccaccacctcatagcagtcaaacgaatcattctgcgaataggaagcgatccggtaatagtcgccgcttcgcatcagcgcatgatatttatggtacagcgccacctgacccggaattttcgcccggtcttcctccggaagctttgtcacatccagctcgtagccgaacgtacccgccagcgccacatttcctctggtctcaaacggagttacgcgtcccaccgtgtggttcgggcagtcggacacatgcgcaccgatcgcggagagcggatacagcagcgccgttccctcctgaatctttaagcgctctatggcatccgtgtcgtcggaacaccagatctgtggactgtaatacagcattcccgggtcaaatctcgccccgccgccggagcagttctcgagaagcagctccgggaattcggtgatcagacgctcctgcaattcatagacgcccagcacatagcgatgcagcaattctccctgcttttccaccggaagcacaccgcttcccagatcggtcagctgccggttcatatcccacttgacataagcgatgttcgcgctgcgcaaaatggatgccacacactcatacgcataatcccgcacttcttttctggagagatcgagcacatactgatttctcgaccggcacggcattctccccggaagggcaatcgcccagtccggatgcgtccggtacagctccgaatccggcgagatcatctccggctcaaaccagatgccgaactttaatccgatctcattcacctgatcgaccagccgttttaatccacccgtaatcttctgctcgtttacctgccagtcgccgagacttgtgttgtcatcgttgcggtggccgaaccatccgtcgtccatgaccagcatctcgattccggattttttcgcctctctcgcaatcgcaagcagcttctccgtgtcaaagtcaaagtaggttgcctcccagttgttgatgagcaccgggcgctccctgtccttatacgggctgcggatcagatgcttccggtagagatcgtgcagcgttctcgtcatcctgccaagcccggcatccgaataagtcatcacaacctccggtgccgtaaatgtctcatcctgctttaattcccacctaaaatcctgcggatgaattcccagcaccacgcgcagggaatcaaactggttcttctccacctgcgccaggaaattgccggaatacacaaaatggaatccgtacacgcgcccctgctcctgtccggcgtttgcggacaccagcgccacgaacgggtgctcctgatgggaagattcaccgcggcaggagccaacagactgttttccataaccgatctggcggtattcgatctgtcgctctctcgcccaggaaccatgcagcgtcagcatccggtaatcctccgcgtcaagatccaacgccgtagaaaataccttcgtaagatacaccggttctttggcatggttcgtcacgcgcacgctccgcgtaatgacatccacgtcataaaatgccgtgtagtacaatgtgaccgtaagatccagcacttcatccgccagcacaatctcaagcgtctcacactcttctttgctgccgaacgtggccggaagtcccggaagtcccggtttgcccgcatagatcttatgctccctgtaaagcggctgcaccgccgtattgccgtttttgtccgatacggaaatcgcactctccctgtaatcgccgacgccgtgccccggatactccatcggaaacgcatccagaaaagagctccggtcgcggttgttctgtgaaggaacaaacggtgcctccccggtgcgcatcagcgcacggacgtcatagtccgtgatctttgcgccgtaatagatatgtcccaaaaacttttcttcatccacgataccgatcagataactggtatgtggtgtatccagtttaaaaacccgttctttttcgtaataatgaattgctcccataccatctcccgcttcttatttcaacagatcttccttcaatgccgcaagctttgcatccgcatccgcaagggaggttccctttacgccaaagtagtatttgatcttcggctctgttccggacgggcgcacacagcaccatgcattgtcggaaagttcataatagagcacgttcgatgtcggcagtccggtctttgtcacctcaccagtcacaagatcctttctggtgtcctccttgtagtcgcgcactgccagtacctgatgaccgcccagctccttcggcggattcgtgcggtactcactcatcatcgactggatctgtgccgcaccgtcgattccctttaaggtctttgtctccagtccctctctgtagtagccgtacttctcatacatatccagcattgcatcccacagggtcttgccgtgcttcttgcaccaggaagccacctcgcaaagcatcatgaccgccacgcacgcatccttgtctctcgcgtaggttcctgccaggcagccgtaactctcctccagtccgaatacgtagtgatacgtatgctgctgctcgaagaacttgatctgctctccgatatacttaaatccggtcagcacctcgatcagcttcacgttgtaggctgccgcgatcgcttttgccatatcggtcgtcacgatcgtctccacgagcgccgggttctccggcatggttcccatcgctgtcttctctcttaagatgtactctgcgatcagcataccggacatatttccggtaaatgtcacnnnnnnnnnnnnnnnnnnnnnnnnnnnnnnnnnnnnnnnnnnnnnnnnnnnnnnnnnnnnnnnnnnnnnnnnnnnnnnnnnnnnnnnnnnnnnnnnnnnnnnnnnnnnnnnnnnnnnnnnnnnnnnnnnnnnnnnnnnnnnnnnnnnnnnnnnnnnnnnnnnnnnnnnnntgccagctttaacgcaagctcaaatgccttcggggactccggattcgggtaggataccgtcgggaaattaccgtccggcagctcctgctcttttaccacgtacacctgctcgaatccaagctcctttaacacgcggcgcaccggaaggttgccggttccgtggagcggtgtgtatacaatcctgatgtccttcgccatctccttgatgacttccggatgaatcgactgcttcttcagttcctccatgtaacggtcgtcgatctcttttccgatgaccttgtaaagtcctgcggcaacggcatcttctttcttcatcgtcttcacctggtcgaacagatcggcaacctgaaaggcagagaacaacgggagcttgcggacgatcatccggtgaaacagatttatgagaaacggctgaacaccataaaccgctatgtgaagcgtggtaaactggacgatgatcttgcagaggttatgaaaaagctggcaaaagataagatgcttcgggcgctgagcaatgtcgcctatgccaaggaccattatgagaaagagatggaacaggctactttgatggaagaagcaaagatgaagagtaggtgataaaaatgcgacatgatataccttttccgatacataatgattatgaaatatgccactatttgaagaatatttgggaatgtggctggcttgacgagtattctgatgaacattttcttataaaggcaatagaaaacaggttgacaacctttgtcggatatactcaaatgcttaataacgagcccaatcttcatggggtaatcaaggctaagggcattattgacaacgatacctttaattcaaatttctgcatgaatttatctggccgattagcgtgcttagaatccgtatttggaagcgaccacatggaaagattcatcaaagatcagttgtcggcaggaaaacaaaattataacgaagatacattttttgaagcagtgtccgaagtatctgttctatatttttatacgttcaggagcaggtggaaacaagccctgtatgaacctcctattggcaaatcaaagttgtcaaaaaatccggaagcgagattcattggcgaattatcgttgaatggtgatgctcagaaaattacaatcaatatagaggtgaaatgtcccaagttcccatcgatcgagaatcaagaatgcaaaattgcgatacctaccgttttgctttctgatgaaggtagaaaagaaattccagcattctgcaaggataatgggattgtctatataagtccacgtgttatgaaactcaaagattttcttaacagcgcttcttcgaaattttctgttccacaaagcaacgagtacaatctattatatataaattggtcatattgtgactttgcttcgaacagtttccttgaagcatggtctttgttaaccaatgcgataaatggtattcttacgcatcccaatgctgcccagagcataggtgtatcacctgatgttttcaaaaaaatcaccgctgttataatttacacagaagcattagagggcttgatgttcttagactttcgaaatgcatggcaaatgaatggacgaggacaaagatttcgaatgtgggtattagacgaaaagttgcgccatgctgaaacaactcgtgaatctgataccttgttttatgtaacagggatgaaacccaatgatgaacttacgcagatggcaatgctggattgcaaatctaaaacagatagcgatcgagtgaacagctctttaattgggttagagttagtagatttggttgagaaatacgccgaaaaatattgagattcattcttggaaggaggtgcgctatgctgaatgatttttcatggaatatgaccggatacataccaaagtatcaagtaaatccgcacggtgacggcatcatttcctatgttgcagagcgcatcttccaactggaaccggagccgccagcggtggacagtctgaacgaatatatcctatctgccttacaggagaagaatttgctttatttttcattcttcctgcaccactacgagccgcagcttaacaagcgcatcaaagactttctcggtgtggatggcggcgatctgtacgacacagaccgatttatcgatataaagctctcctgccgggagcaaatgctccaaaagctgatggactatactcctgccaagggtgcggagtatgctacatacatctatccgttcatctgggattctatgctccgtttccgcatgggcgaagaaaaatggtcggtatcctctctgaccaattacaaaatggtgcgatcaatggcgtggctgtaccataacaccaaagatgcggtcaaccagttttccaagaagtataactgcgaccttgctcttgcggaagaatatctgaaagttgtccgtggaatccgcaaccagcagccgttctatataacggacgaggacggcgaggaaacaggcgaggatatagcccttgacgatagctggaactataccgacatcctctggaacggcatacaagcagaaaaggtacagcgggcatttgagaagctgaattaccgggaacagaccttgctcgaaaaacggttagcaatctgtatgacctgcgggcgagttggctcatggaagaaccgccccacttttgaagaattggcgattatgtttgagggcagcacagccagcggtgcagagcgagcctaccggaaagcggtggacaaactgacagaactgctggttgccgaaggtgcgctccatgctgtccgactgaaacagaaatccaaaaccaagcgcaaaaagaaaatcgccgccgcaatctacgaataccaagcagactgcgacggcgaatggggcgagatttcatttgattttgagaacggtacagcagaaatagtccggcttgccgattgggatacaattaaaacgaactggtttgccaatgaggcgatccggtatactttatcattgtcgcctgatgctcttaaaaaatatatgctcgtcccccttgagccgctacttatatcctgaatccttacaacaactgtaagtggtatttgctgtgttcccatgctatcattttattacaaatgataggaggtattcacatgaaacccattttgaatattgaaaatttaacaaaaatctatggcaatgtgccaagtcaaacaaaggcactgaatgggatcaccttccaggtgatgccgggagagtttcttggcattatgggaagcagcggttctggtaaatccacactgctcaattgtattgcgaccgtgattcaacccacaggtggaagcattcaggtggagggcgatactctgcaatccctcaggggaaaggctcttgcagagtaccgtggcaaaaaagttggttatctattccagaactttgaattgctggacaacctgactggcagggaaaacatcctgctcccgacttccttgcatggggtatccgaagcagaaagcagccagcggctgaagcagttggctgactatctggaaatcactgatgttctggataagtttccgtccaagatgtccggcggtcagcgtcagcgtgttgcggcagcaagggctctgatcttacatccccaaatgatccttgccgatgaaccgacgggtgcgctggattctaagaacgcaagaagtcttatggagaagctgtccggcctgaatcgtgacgaacaagctacgatcctgatggtaacccatgattccaatgccgccagcttctgtaagcgcatcctgttcatccaggatggcgtgatctttcatgagcttcggcgtggagacgaaagccagcaggagttctacgggcgcatcctgaaggtgatggcgcaactgggagggggcagcgcaaatgttctctaatctgatttttcgaaacagtcgccgcagccgaaaggaaaacggtctgtttttcagctccctggtgatttctattattgccttttatatgattctttccatctccacccaggatgtaatgatttttttacagaaaatggagagcgacgcagtgaacaggctcttgcttctgattcctgtgttttacggaatgaccctgggtattcttttctttttgatttacttcgcctgcaagtatcaatttgagcgcagacgccacgagtttggtgtctatctgatgttgggaatgcgcagaagcaaactgttctggatgcttttggcggaggatttgttaagcagtattctggcactgctcattggcttacctacggctgtagtgctttcggaaatcgttagtcttgtcaccgccaagcttgtgggtatggggatcatcggccatcatttttctttgtcttggtccgcaatgaaatggacactggcaggatttctggcaattaagctgacggcacttctgattttgagtggacggatcagccaccaggagatcggtactttgctatcccagccagcgaaccgtcccaaaaagcaaatgccttctgttttctatgggctggctgctgtatgtgcaagtgtgatgttggcaacggcttattacatggcaattcaaggaattgcatggacaaaggtaagtatgatgggactgactttactgttaggttcggctggtacgatgctgctgttctacggaatgcgggcactgattgcactgattgttaaaaaaggcaagggaaataagcagcttcatgtatttaccttccgtcaaattcaggagaatgtcattcatcagtcaagctccatggcaatcagctccctgctgattctggcagcactgtgttgctttggtgcaggcgtgggaatcgcaggaacaaacaatctatccactggtcatgtaatcgactatacctttgaagattataccgttgaagattcggcgcaggttcttccaaatatacaggcagccctgaaagaaaacggtttggaaaatcagttttctgagctttttgaaatgaaggttgggcatattcgcaccacagaagattacgagaatgcctacagcatggatgctgttatggaatctcttcggagcctgccccagtcggaagatcgggatgtccttctgaacactcttggttatgccacagatccgtatctgatttgtctgtcagactataatcgtttactggaattgtccggcaaacctgtcattaaattaagtgaggatgaagccgctgtttatataggttccgactttactactgtaaatcgtaccgcaatgctgaacggcatacttactgaacagcctgaaacggaactggttggcagtccgatttatcttactggagaggttcagtctgtaaatttgattgtggatcgttctattactttgtcctttgcattgattcttccagatgaagccttcctctatcatacccaaggaatgtatgatacgtatgtgaatgcggtactcagtgagcaggctatggaaggaaatagccttatgactgcctattccgatctgaacgagaagctggacaaaataggtatcgaatatgaaagctatcttcagaatatgggccgccagcttttctacaccgtagcatccatctatattaccctctatctggcgattgtgttcctggtggttgccaacaccattgtgggtgttcagttcctgatgagccagcagaaaaccgggcgtagataccagaccctgatccgcctgggagccacttacgaaagcctttgccagtctgccggaaagcagattgcgtggtttatgggacttcctgtattggttgcagctgtcagcagtctgtttggagtcagagcgttgtttacagggatactctcgtcccgaacccgtgggacagtgcctgaaatgctgcttgtatctgctgctatgattttgctgctttgcgtgatagaatatatttatatgagagtggtcaagcactccagtgatcggtatttgctgacactgatgcagccgcagagagaagaataatttggaaggaggtgctgtcgtgaaaagaattgctgttgtggaagatgaagtctatatgcgggaagaactctgcaatatgctccaaaaggacgggtatcttgtgaaggcaatcaccgagtttgaagatgccgctcggctcttggcagccctccgtcctgacctcgtgatcttagacctgaatttaccggaaatcagtggctttcaaatctgccaggagttaaagaataaaaccgctatccccatcctggtgctgacttccagagatcaggtaaaggatgaactgcaagcgttccagttgggtgcagatgaatatttgacgaagccgtgcagaaaagaccgacttctcgccagggtatccaatattctcaaaaggtatgaaggccgtaccaacctcatagagggattggacttcttgttggaccagcagacctacacactttatattcataacacctctgtggtgcttccaaaaaatcagggaaaactgttggtcgctcttttgtccggcggcgatgctctggtcacgacggagcagctttgcatggcactgtggggaactacggaatacatagatgaaaatgccttgcaggttaacctgacccggctgaaaaaaacgatgtccgcccttgaaatgaagcagcgaatcgttgcagttcgaggaatgggctaccgtttggaagcggaggtgtctctatgaagcagctttggcacatgatagaacggtactacccctggcttctgttgctgctgggcgtggattgcttttgcgctgtcattctttggatttctgacattcaggcatttcaaaccttgatcgggttagtagttctgacgagcatccttttgttttcagcgattctgtttgtactaaacaagagggagaacacccacatggaactgttccgggatttcctcagtgatcctaccatctgcaatgaagaacggctgctcagtgccattagtcagaaagaaggagaatctgtccgatttttggcttcggttttacgggaatacaaaaacgagagtaacaatatggcggatgccctacgggactatgaagaatacgtggagggctgggcacatgaagcgaaaacgcccctatcgttgctgaccatgctcttggataaccggaacgatgaaatctctccttccctgcaagcaaagctggattatgtccgcagtcagcttcaggaggatgtcacgcagatgctgtactatgcccggttgaagagcagtacaaaggattaccgatttgaggatgtcaatttgaatgactgcttgggtgaagttttggaggactatgccccacttcttgaagagaagcagtttgtcattctcaacaaactgcaatctgaaacagtctatacagaccgtagaggacttcagtttatgttgggacaaatcgttagcaatgccatcaaatatagcagcgatagtcccatgcttacaatttccatgatacattcggagaccgcagatatcctttctgttgaagataacggcattggcgtaaaaaaacatgatctgccgtacatttttcaaaagggctttaccggggattctactgacagcagaaagaaggctaccggtatgggactttacctggttaagaagatggccgacgatctaaatcttcatctggaagcagcttcccagtggggaaagggcttcaagattgtcatcttctttcctaaattgagatccagcggaggaaaataatataaacagaaaaacgcccgcaggattttctcctgcgggcagcgtgttgtcagctatccaaaggcttgtattctgttacagttttcaaataggtttcgggatcgccgttcaagataaggtctgcatactccaaaggagcgttgtagatcaaataatccagctctgaccgctgatacatattgtcagcaatctcgttctcaacggcgatagtgtcaatcgcaatcatactgccgtcgctgaatttcagttccacacagcaattatccatattgtaggcacaagatattaaggttttcatggtatgtcctccataattcgtaatataaagcgaaaatcccgtctgacttcctgttagaaatcagacgggatttgtccgtatgcaccccggaaaccgtcagctaacagttgataagtaaattagttccttatcactgttaagccaagtttttccgggcttttgctatatctaaacgggctgatatggtttgaccaaatttggcaaaacgagagccgatttcatccaatttttagtggtccgcaagtggttaactggccaaaaagagggcaaaaagagggggaagtggttcccaaagtggttaaccgagagccgattttgggggtgcttttcagccctccttcccctcgttttttggctgtggcagtttggcatagtttgagctaatttgaataattgaatatgaatttgatgtagcacacagtataaatgctgggtgcttttttcatttcaggaactcgtattccggcgatagaaagagccgtcacttcactttttattttggagtggcggctttttctatttccagaagcaacagcaataattagaaatgaggtgaagtcaatgaacacgcaaatcatcgccatcgccaaccagaaaggcggcgttggcaagacaacgacctgtgccaacttgggaatcgggctggcgcaggccggaaagaaagtcttgctgatcgacggagacccgcaaggcagcctgacgatcagcttgggcaatccccagccggacaagttgccctttacgctgtcggacgctatggagcatatcctgatggatgagccgattcattccggcgagggtatcctgcaccaccaggagggagtagacttgatgcccgccgacattcaactttccggtatggaagtatccttggtaaatgctatgagtcgtgagactatcttgcggcaatatctggacacactgaaggggcaatactcccatatccttatcgactgccagccctcccttggtatgctcacagtcaatgcgctggccgctgcgaataggatcatcattcccgttcaggcagagtatctgcccgccaaagggctggaacagcttctatctacggtcagtaaggtgaaacggcagatcaatccaaagctccagattgacggtatcctgctgacaatggtggataaggaaaacgggaagtgacagaagatgatgagagagaagcggatgccctgtgcaaacgccatctggagcgttggaaggaggaacaggaatgaagattttgaaatgtctgctgatgatcgtaactgcaccggtcgttttggtgttgacgctttttgtctggctctgcacggggctgatctacatatccagtctggtgcgtggtctactaagcacggtaattgctctgcttggcgtggctgtgattattacctattccccgcagaacggtgtgattttgctggttatagcttttttgattagcccgatgggattgccgcttgcggcgatctggctgctgggcaaggtacagagtttgaaatatgcaattcaggacagagtgtacgggtgaatgtatcttgctcacaatcttggtcattgactaagttgttctgactaagatggtagggttatagtatgataaatattttgtgaaaaatgtctgagaaagaatttatttataaatttcgcagagaaactgcaaaaacaagccgtaaatattgaccaaggcatttttaactgttataatagtgactgaagatacgaatactgagaatggaggtattcaattatgctgattcagtttacagtggaaaatcacaggtcaataaaaaacagtaccgtgatcagttttgcggcctctaaggataagtcatttgatgagtatctgcttcgtccagatgaaaagaaggcattgctgcccgtacttgcaatttacggtgcaaatgcagccggaaaaagtaacgtattacatgcaatgatgacgatgaaagaaatggttgtgggaaatgctgcaaaagtttctaagggacaaaagttgccgtgggagccgtttggaggaacaaaggttccgacttcttttgaaatggtatttatttttcagggagttcgttacacatacggtttttcttttgatgcaaagaagatttacaaagagtatctttaccattggccgaatggccgtgaagccttaattttttcaagagaaaatggagtgtatgagttccgggaaaatgtaaatgagcaggttactctgagtaaccgaacaccggacaataagctctatctggtgtcctctaatgactggaatctgcctcagacggaaaatgcttatcagtggttcctggaaaagttgacattcctgatggatgaagagccagctacctcagaaactgttgcccagattgtcagcggtgatgataagaaagctcgaatcttaaaagaattgatgcttgccgatcttggaatcaccgatgttacaatcaagaacacctctggtaaaataccggttattacgacaacacatcgaattattaacgaggacggtacaacagaatactttcagcttttaatggagcaggaatctgtcggtacacaacacttttttgcccgcattggaggatggttgcaggcacttgaaaacggtgcacttttagttgttgatgaaattgaggatagtttgcatcctcttttaaccagaaggctgattgaaatggtgcaggataaggctgtcaatacaaagggagcgcagctgatttttacaacacacgatgcaatgctacttgacttgaatttcttccgtagagatcagatttggtttgctgaaaagaatgatgagacttgtgcaacagagctttactcgttggcatctttctctccaagaaaaggagaaaatgtgcgtaagggttatcttcagggacggtttggtgcaatcccttttatcggaggtgacgcctgatgagcaagatgcgaaaagagtatgacccgaacaaagttaagcggcgtaagcgtaaaccgattgtttatatcatctgcgaaggaaaagaaacagagacactttatttcaaacattttcgttcacgaaactgcctagtggatattatcccaattccatcgaaacataaggcggcggaacatttggtgaaacacgcaaaatccctgatttctcaagcagattattatccgaaagatggagatcagctttggtgtgtattcgattgtgatgataataaagactctgagcttcaagccgcaatttcttatgcggagaagcatgggtacaaaatcgcatattccaatccagcatttgaatattggtatctgctccattttgaaaaacgaaatggatatttgaaagattccgctacggtaattgacattttgaaaaacaaagggtatttggagaactacggaaaaagtgtggatgtttttgaagaattgcaggaacatcaaccggaagctattcagtacgcaaaagaacgggtggagcgattaaccagagatcaggttgctgtgatctgccgggatagtaatccggtaacaacagtctatgagctggttgaatttttgaatagtaaaagaacataaaaacaccattgcagaggtgtgcataatgacagaaagctgtcacttcaacgataaaaattcgttgggtggcagcttttgtatttggaaaggaggaagaattatggcaactacaagaatcatgccgcttcatgttggcaagggccgcacagaaagtcgggcaatcagtgatatcatcgattatgtagcaaacccacagaaaacagataatggcaggctcatcacaggatttgcgtgtgacagcagaacggttgatgcagagttccttttagcaaagaggcagtgtatcgctgctaccgggcgagtgcaaggaagatatgaaaattaaaattattcataaattgttttgatagattgaagaagatttttgaaaagagtatactgtaaaaagaatataaaaactcaatttaaatattagacattatatagagagtggtactttttgagggggaatagctgtatgattttaaaaaaagttaaaattacaaattataggcagttacaaaatgttgaattggatatgcaagattctttaacagtattagcagggccaaataatagcggaaagacgactttgatttctgttttaaagggaatgttttgtgataagaagctgagttttaattatagcgatattccaatacagttatcatcggattggttggataagatactgcctatttttcaagcagttatgattaaatacgatagagaatcaggcgttagggaaattattactaaaatatcaaatgacgataaatttattgctgactatatcatggatagtttccaagcacagattcaagtagattataatcctgataatgatgatatccaatattttgcagattatcttatggatttggatgacaccaaacattcattttattttatctacacatatgaaccaagtatatcttcttttgaaaagaatttaactgagcattatgataggatgtcggctcgctttagagatattaacaatcctcaaggtgttgaaaaagatactaagctttactttttaaaagaagaattacttagattatactgtaatgcagctattgaaaaatgttatttttgtaattcggactatgggaatgcaaatccaatggaagtttttgcgtttaaaaaattattcaattttcaaaatatacctgcaatacgagagttagacgatagtgaatctgattcctctaaaggaattagcaaacgagtcatttctctgctaaaggataatgatacttgggtagaagcaactaaaaaacttcccgatttgttaatgagtgatattgaaaactctggggcaaaaaacgaaattaaaaattcatcaattatatcattggatgatacgataagagacatatcaaaaactagtggtggacatattggaaagcttcaactggagatggatgttagcgaacatgatgtagaggagtttattcagcgaatcacgagagcaaaatacgatattgatgggttgctgttaaatgaagattctcaaggattaggattcagcaatttgatttatttacacatgagattagaggaattttataaatctattgagagtaataaagtgaatgtattttttatagaggaacctgaatcgcatatgcatcctcaaatgcaaaatgtatttattagatttctcaaaagatattatatggataaaaaaatacaaggtcttatcacaacgcattctaatgaaattgcaagaatggttggtctcgatagtcttagagtaattcgacaaactggaagatcaaagagtgaattatttaatttgagcaaatttagaaattcaataaaaggaataaaggttacgaatattgaggaagaatctcaatttcttttagagaacttctttgattggttttttgaaataggatattctgagttgatttttgcagatagagttatactatacgaaggcgattcggaacgattatatattagaaaattaatcaaattgccagaattttcagctttagctgacagctatatagcatttattcaagttggtggcgcatatgctcataattatgtaccaatacttaaaatgcttaaaataaagactctgataataactgatttggactataataaagatgctatgagtatggaagaagtaaaaagggaagattccaagagtacaaatgcaacgataaattattgttaccgattggttcatgctgatagagaaaaagattattctcctactattaaagaattatatgattttcaagttaaaggggaaagtgtgttgtataatgggttagtatatcttacttttcaggatgagaaaagtactgcgcgaactttagaggaagctatgctgaataaattattaaaagtagatgtgtttcatgcgataaaaagaagtgagtggaaagaaaaaagaaagattaataatctaactttttctatacctaacaataaagaaaatgaagaagatagtgaatactctattcatagaattgtagaagcaacatctaataataaaacagattttatgtactctgtgattttgagtggaaatgagaaaaaaatgcttccagactacatagagaaggggttattatggctggcaaaataaaaaacaacaaacatttaataaatgctccagcaggaagtggaaagaccacatatatacgcaatgagctaaagagtatttgtcttaataatcctgaaagtagaattttgtgtatcacatatactaatcgagcggcagatgaacttaagaaaaatttggaaggtgctaatattacggtaagcaccattcattcttatattaatgatttgattagtccattctactcgcacaaagaagtgttagatttatattgggaaatatatgctgaaaaaatcaagaatagaataaagaatgttacaaacgatgagaatattaagaaaagcaatcagtactatattgaaaaatatggggaattaacagagaaagctgtgcaggagaatatatctgagttatcatatggagaaactccgttcacttctctatatacgggtaaattgtctcatgatgacttacttatgtttgcaaacaaattaataaaaagatatccgattttgttgagaaaaattggagataaatataactatatttttattgatgagtatcaagatacgtcagcttatgtgcttgatattttttatgatgcagtagaaaacagagagaatattcagatatatttatttggagatcggatgcaacagatatataaaaattatgacggttcatttgaagaaagaatgaaaaagtttgatacttccgatcagcttggaactaactttcgttctatagggaaaattgtatctattttaaataatatttacaatgatgcttcatttaaacagcatcctacagaaaacaatattgatgttgttccagatatagtgccacaagtgattatttcttctaatgcacaggagtgtatttatgagttacaaaaggagtttccagaaatactaacattatacttaatgaacaaggaaaaataccaggaaattggagctcaaaatctatataatgcatatgaaaatatggagaaatattcatttggcagaaagtattcgccaacggatattttgtcggatatgtcaagtgataatccagatatattgatgaagtttctgtttttgttaaataacataatgagtttttatgcaaatgaaaactatggtatggtcatttcgctttgtaagaaagagagtaaatattttgattcgtcgcaattcaaaataaaaaagcatacggataagcaacggataaagaataaatttgataagattcaagttgaatatgaaaaagagggatgtctaattcgagatatagtagagtgtttgtttgctaatggttttataccagaagcagtaaaaaatgattttgaagaaagtacagaatatcagagtgtattagatatcaagattatagaagttaaaaatctagcgagatatttaaatatgcctcatatatcaacccagcatggtgtaaagggcgaaagtcacccttctgtaatttttatggcttcagataacaatagtactccgaatgtacgaatgtacccattttttgagctgtggtcaaatttggaattttctcttcctcaatttgaaacattgttctattcatataataggttgatagaaaaagtagaagcagagcttggaatgaaaattagtgagcttacagcggaaacacataataaaagtgaaaagaataaagcgattttggttagatatagtaatgaagttttagaaaaatatcaagggaatatattatttgatgcattgtgtaaagatgattttatatcatatttagccaagcaaaatgttggaaatgcaaagaagattttcaaaattacgaagatggaaggtatattaaccgcttataaattattttatgtaggatgctcacgagcaagaaaaaatcttattgttgtagttgatgcatataaggttaatgggtttaaagaagctttcatgaataaaatgaaagagattggattttctgtattttgcaaatagtaggatataatttctacattttggattctacgtattgagaaaaattaatttaaaacagttacttataagagtggtctgctatgtcaggccgctttttttgagaggaggcacactttattatggcaaccacaagaatcatgccgcttcatgttggcaaaggccgcacagaaagtcgggcgatcagtgacatcatcgactatgtagcaaatccacagaaaacagatgaatattccggtcagcaagtctatactgtccggttattaggaaaccgattggcaattatgtagagtataagaaatctcacgaatgtaaagccggcttacgccccgcaaagcggctttgggcttgacattcgctcaatttcttatcaattataaataagccaattaaagatggtttccgctccggaataccggtttccatattaccggaatcatggttttttacagcaagaatattcaaacagataacggcaaactcattaccggttatgtgtgtgacagccggactgcggatgcggagttccttctggcaaagcggcagtacattgccgctactggacgagtgcgtggtacagatgatgtgattgcatatcatgtgcgccagtccttccaccccggtgagattaccccggaagaagccaaccgtctgggcgtagaatttgcaaagcgttttactaaaggcaatcatgcctttgtggtctgcactcgcatagacaagtcgcacattcataattacattatctggtcatcggtcagcttagaatatgagcggaaattccgaaacttttggggcagcaccaaggtggttcgccggctaagtgacaccatctgtattgagaatgaactgtccattgtagagaatccgaaacctcacggaaagagctataacaaatggctgggcgatcatgcaaagccctctcaccgagagctgcttcgtgtggcgattgacaacgcattatcacaaaatcctgctgactttgaagaactgctgaagctgttgcaagagtatggttgcgaagtctcaaagcgcggaaaatcgtatcgactgaagctctctggttgggagaaagccgcccgcatggacagtctgggcgaaggatatggattggaagatttgcgggcagttctcttagggaagaaagcacataccccgcgaaagaaaacagtcacacaggcagagccgccaaagatcaatctgctggtggacattcaggcaaaattgcaggctagaaaaggtgctggctatgctcgatgggctaaagtttttaatctgaaacaaatggcgcagaccatgaattacctgtcagagaacaatctgctggagtatgcggttttggaagaaaaggctgcggctgccacggcacatcacaatgatctttcggcgcagatcaaagcggctgaaaagcgcatggcagagatcgctgttctgcgtactcacatcgtaaattatgccaagacccgtgaggtctatgtggcataccgcaaggcgggctactctaagaaattccgggaaaaacatgaggaagaaattctgctccaccaggctgctaagaatgcctttgatgagatgggagtcaagaagcttcccaaggtcaaagagttgcagacggagtacgcgaaattgctggaagaaaagaaaaagacctatgccgagtaccgacgttcccgtgaggaaatgcgggagcttttaacggcaaaggccaatgtagatcaggtgctgaaaatggaggtagaacaggatgttgaaaaagaaaaagaccacggctagcggtaagctggtcctggtcaaaagcgttcgcaggcactggacatccgggggatgtccgcttagtgccgaccggagtggaacggagaccgcgcagccacagaatgaaattctgtgttcaaaggggcttggggcgctgccccgggcaagcaagcggagaggaaaatcacggagggattttcttctctgcgggcctgtgtgtattaacacaggcattgcttgcctcttttcgtttcaaatttttcggacaactctgtcagttctttcaccgtttcctgggtgtgatgcagcagggtgtcacgcatttctggcggacagctggaataaagcattttcacctgattgacaccctcatcctccagagaaacatctggatttataagcgtatctaaagagatgtgcaggacctttgccaatgctctcaaaatcaaataggaagtattcattttccctttttcgatattggcgatttgctttacagaaacatggctcagatcagaaagtttctgctgcgtcatatcttttttctttcgggcttccagcatttttgccccaaagcagtcaaatcatcaatcggcataatcgttcacctcaataatattgtatcgttccggtttatgtgatggaatgaccttattatgcctgacaagctgtacgattatgccgattatataaagctgcgattggtgataaacttgtattgttcgagacaaagaactataatgtactctgtggaggtgcataatggattatatgacactaaaagaggccgccgaaaaatggggcgtgacacctcgtagagtaaattactattgcgctgctgggcgtatatctggagctgtaaagatggcaactatctggctaattccaaaggatgcggaaaagccgattgatggtcgaacaaaacaaggaaaggtaaaaaagtatgagtaatatattacttcttgaagatgatctaagcctgattaacgggctttcttttgctttcaaaaagcaaggatttgaattaaatatcgccagaacgctcaaagaagcggaggaattgtggacagacggaaaatatgatttgttggtgttggacgtatctctgccagatgggtctggctttgaattttgcaaaagagttcgacttacatcaaaggtgccaattatttttctgacggcttcggatgaggaaacaagtattattatggggctggatattggaggtgatgactatatcacaaaaccgttcaaactgggggttctcgtttcaaggattaacgccttacttcgacgtgcaaattcttttcaagcagcagacacagaattgcagtcgaatggcatcaaggttcttttgctgcaaggacaggttttcaaaaatggggagctgttggatttgactgccgcggaatacaagctactgtgcttgtttatgagaaacccaagcatggtgctgacaaagggacagattttagataagctatgggattgcgacgggaattatatcgacagtagtacccttacggtctatatgcgtcggcttcgtatgaagatcgaggataatccaagtgaaccacaaatgctcctgactgttcgaggtatgggatataaatggaatattatcgggtgaggtgcagaatgaagatactggcaaataaagaaatcaaaaatctatttctttcgctttcactggttttgggggttacatttctcttagccgaggtttttctatggctgtcatatcgccggctttctctgttattgctaatcctttttctattggctggcggtgctgtatgggcagtctgctttgtatattttaatcggcaaaatcagatcatggagcaggcgatattacaaatcaatgcgtatcttgatggtgatcgcaatgcccgtattgaatgtgacaatgagggcgaattgtaccgactgtttcattccatcaattctttagcggcagtgttaaatgcccatgcagataatgagttacgagagaaagagtttttgaaaaatacaatctccgacatttcacaccaactgaaaacaccgctggcagcactcaatatttataacggactccttcaagacgaggatatagaagtgtcctccgtgaaagaatttgctgatctgtccgagcaggagcttgaccgtattgaagttctggtgcaaagccttcttaaaatcacaaagttggatgctggttctattgcatttgaaaaggaaatacaaaatgtagcggatatgatgcaggatttggagttgcactttgcgtatcgtgccaagcaggaacagaaagagatcgtcttatctggtgcagatgatatttcccttttctgtgaccgtgattggttgagtgaagcgattggcaacattgtgaaaaatgcgctggaccatacagaaaagggcgataccattcacatcaaatggaaggcactgccctctgctgttcaaatcacagtaaaggataacgggtgcgggattcatccagaagatttacaccacatcttcaagaggttttatcgcagccgcttttcaaaggatacacaggggatcgggcttggcctgccgttggcaaaagcaattatcgaagctcatgggggtctaatagaagtggaaagtgaattaggaattggaacgagttttataatgaatttcccaattcctacaaaattgtaggctggttgtagggttacagtaatattggggtgctattctttccatcgtagacagggaacgaaagtccacccgtttacgacagcaaaattattgagaaagaggtgtttgcactatgaacttgttagaagtcaaaaatatttgtaaaacctatggcaacggggaaaccgcggtcaaggctttgaaagatgttagcttttctgttcccaaaggagagtatgtggcaatcgttggagaatccggttccggcaaaagtacactgctgaacatgatcggcgcattggacacgcctacgtcaggcaaggtgctgatcgacggcaaggacattttttccatgaacgacaagaagttgaccgtgtttcggcgtaggaatatcggctttatctttcaggcgttcaaccttgtgccggagctgaccgtggagcagaatatcatattccctgtgttgctggactaccagaagccggacaaaaagtatctggaagaactactggcggtgctgaatctgaaagagcgccgaaatcacctgccgagccagctttccggtggtcagcagcaacgtgtggcaattgggcgggcactgattacccggccagccctgatcttagctgacgagccgaccggcaatctggacacgcagaatagcagcgaggtcattgccttgctaaaagaggcgtcgaaaaaatacgaacaaaccatcattatgattacccacaatcgcagtatcgcgcaaacggctgaccgggttttgcaggtatcggacggtgtactgaccgacttcgggaggtgccgcgaatgaaaagctatcttagccttattccgatttctgcaaaggtgcggaagagacagaataggatgacgatgctgtgcatcattatctcagtgctgttggttacgatgattttcagtatggcagatatggcgatccgaatggaaaagacacgagtgatcaaagaacatgggaactggcatatcatgttgaaggagccatccgagcaacagattgagcaaatcgcacagcgaacagatgtgatgacatcctcccgttatgacggactgaactttgatttatccgaagactatacgatcaatggaaaaagctgcgtcatcgtaggtggtgataatgcgattctaacggagatctatgacaatttgactgaaggccgatatcctacaaaagaggatgaaattttactttcgaatcgttcaaaagaactgctttctctgaagattggagaggcgattaccgtacatacaccagctggagattttggctatacgatttccggttttggaggagatgttaccattaccacagatgccgacattgtgggggcttttctaaattgggactccttccaaagtcttgcaaaagcagaaggaagtaagcttgctcccgtttgttttgtgcgcttttacgagaatatccatattcgtaaggtgattgcagagttgcggaaaacatatggctttaccgacgaaacattatccgaaaacacggctttgctgggattgacgggcttcagcagtgattcttatgtcatgggaatgtaccttgtagctgcaatcttgtttgttctggttttggctgcgggagtctttatgattgcgggaagcctgaacagcagaaccgcagagagaacacaattttttggaatgcttcgttgtattggagcaagccgggcacaagttatgcacatagtcaagttggaagcactctattggtgcaaaacagcggttccgattggcgtgatagttgggattgtgggcacatggatgctttgtgcactgctccggtttggtgcgggcgctgaatttgtacagattccgctatttgggattagtagtgtcggtatcatcagcggaattgttgttggtgttttgaccgtgctgttatcttccatctctcccgcaaggcgggcggcaggtgtttctccggttgcggctgttaccggaaatctttccgaaaattggaacacatcccggccaatcaagcagaactttttgaaaattgagatggccttggggattcatcatgccgtatcctctcccaaaaatctacttctcatgactggctcctttgcactcagcatcattatgattttgagcttttctgttcttatacaatgggtgaatatggcactcaatcccttaaagccatgggcaccagatgtcttttatagtagtcctgataatctgtgcgacattaaacaaagttttgccaaagaggtggaaagccggccgtatgtaaagcgggtatttgggcggatgtatcaaagccttcctgcagaatatgaagggaaatcggggcaaattgatttgatttcttatgagaatcagcagtttcagtgggcagctgaagatttgattgcaggtgatatatcggctgtctctgaaggcaacggtgtactgacggtttttgataaaagcaattctttgaaggttggagatacgattcagctggagcagacagagcttaccgtggctggagtcttgaaagatagtccctttgatacatcggatcagccaactgtgatttgctcagagaaaacgttcaaggaaattacaggcaaagatgcctatgctgttcttgacgtacagctgtcccaaaaagcaacagagcagaatgtaaatgagcttcacgtattggcaaatggacattatcgcttttatgatcgactggcgcaaaacaaagacacacaaaatacctattttatgttctgcctgtttgtttatggattcctcgccgtgatcacattgattactattattcatacggtaaacagtatttctatgagcgtgtctgcaagaacaaatcaatacggaaccatgcgtgcagtggggatggatagtttacaaatcaagaagatgattctcatggaaaccgctacgtacactacgcttggactcctcgcaggttgtggtctggggttaccgctgcatcattttctctattcgcagatgattacaaattattggggaacggcatggcaaatccctttaacatctattggagaaatactggtgttgcttgtgttcacttctcttcttgcacctttcgctccggcaaaacgcatctgtaacatgccgattactgcaaccatcaatgaattgtaattcaatattttaatctgccgcacgacggcaaaagaaaaaaagccgtcgtagagcagacaatttgacacgcccatttgaaacggcggctttgattttcagagccgccgtttctttgcgtttgcacaaacctataacgacttgcagggacacggtagccgattggaggttattttgccgtgtctcgtttgctttttcaaagctcacatgatctacatcagttaaaaaaagccttgcccctcctccgggcaagtataacattgcatcggcattatcgttccatgtaattcagtataataatggctgttcttggcgcgccagttttccctcacggaaatctggcgttttttgttgccattttttcggagatgacccggttgtctgtcggtgtcggcctccattcgattcaaccgtcaatcacccgtgaatcgaaatggaggtacataatgaagaaaattaaccttcgggaactttatcctgatgtttatacaacagacttttttgtagatgtgacagaggaagtaatggagactattcgggcagctgaacgtgcggaggctgcgtatgagcgaaagatgtatcgttataaagcacagtattctctggattgcgagaatggcattgaaaatgcggtgctattgaagccgcaaacaccggagatgcttctggaggaaaaacagtctcaggagcaggtctatgccgctgtgatgaagctgccggagaaacaggcaaagcgaatttatgcccgatactatctgggaatggcggtaaacgaaattgccgaagtagaaggtgtagacccaagccgtgtccgagagagtatccgccgtggattaaagcagcttgtaaaatatttttgataaaatttcatttgatgcgcctgttttttgccttttttgtcagtgttaataagaaggacaagttttcctccttcatcagtacatatggcacagttatgaaaagaggtgtcctatattataggaccagaatcaaagacgcgaatggtaagctcgtagctatctacgcaaaaacacctgaagaactatacaacaaagaaacgtttgcgttggaacagataaacttgtattgttcgagacaaagaactataatgtactctgtggaggtgcataatggattatatgacactaaaagaggccgccgaaaaatggggcgtgacacctcgtagagtaaattactattgcgctgctgggcgtatccccggcgctgtaaagatggctggtgtttggctgatcccaaagaacgcagaaaagccgattgacggaaggacaaaacaagggaagaggttgcaccatgaataaaatcctgattatagatgatgacagagaactgtgcgctttgattaaacgtagcgtacaagcagaaaacatagaagctgatttttgtaatgccggaaaagagggcttacaaaaattaagagagcaggagtatcagcttgtggtgctggatgtgatgatgcctggtatggatggctttgaaacgctggaagaaatccgcaaagagaacagtctgccgattttgatgttcacatctaaaaatgacagcatttctaaagtacggggcttacgggccggagcggacgattatcttacaaaaccgtttgatatggatgaactgattgcccgtattgcgtctcttattcgccgctacactcgctttaatcagcaagctggagccatacaaaagctaaattttgacggattgcagattgaccttgaaaatcgttctgttactacatcaaacggcacttttgaactgcccccaaaggaatttgatttgctcctgtactgtgcaaaacatcaagggaaaattttgaccaaacagcagatttatgaggaagtatggggcgaagaatatttctatgatgacagtaacattatggcgattatcagccgacttcgtaaaaaattagaagtcaatccttcaagcccaaagtatatacaaacggtcaaagggattggctaccggtttaataaggaggtgtagtcggtatggaaatcattgtattcttgtccgttgtgattgctgttggggctgtattgacttccatcgttctcgttcggcgtgtaaaaaaacaaatagcagaaatgaccgatgtgctggttgatgtgaaaaacggaaatggcaaccggcgtattctatctgcaacaaatgaactgacagcacctcttgcctatgaaatcaacgagatcgttgtggcctatgaaagcagactttcaactgtacggcagacagaagaaaccaaccgccagcttatgacaagcctttcccatgatgtgcgaacgccccttactactctgattgggtatcttgacgctgcacacaaaggactggtcacaggaaaagaccgggatgattatattgaaaccgcccgccggaaagcccatgatctgaaagaatatattgatgtactctttgactggttcaagttaaattcaaacgagtttgctttggagatccaaagcgttgaggccgcagagctgacaagaaatatcctcattgactggataccgatttttgaggataaacaggttgagtatgacattgatattcccgaacatcctgtccgggtaagattggatatggacagctatatgaggattgtcaataatctcattcaaaatgtaatcgctcacagccatgcagacaaaatcaaaattgccctgtcaaagaaggaaaataacatggagctgctgctggcggataatggagtgggaattgagaaggaagatttgaaacacatttttgaacggctctataagtgtgacaaaggacggtctgaaaaaggaagcggtcttggtctttctattgtccatcagcttgtagaaaagatgggtgggagtataacagttgaaagtttgccgggagaaggaactgaatttatgttgctttttcctttggagagttaagcgggttcccgtctttatggcgggagcctttgtcattttactggatttcaaattgcaaggttaatgcaaggttgcggcaaggttaatgcaaggttggcatgatagaataccttacagaacaggaggttttgaatatggatacaaattatatcattgaaacaaaaaatctgacgaagcaatacggctcacaaaagagtgtggctgacttaaatatccatgtgaagcgtgggagaatttacggtctgctgggcagaaacggagccggaaaaaccactaccatgaaaatgctgttgggcttaacgaagccgacttccggggaggtcaaaatctggggaaagtctttgcaagggaatgaaaagaagctgttgccccgtatcggaagcctgattgagtcccccggtttttatcccaatctgaccggcacagagaacctgcgtatctttgctactctgcggggcgtaccaaacaatcatgctatcaaagatgctctggatctggtaggactgccctacaaagataaaaagctcttttcacagtattctcttggtatgaagcagcggcttgccatcgcccttgccgttatgcacgatccggagcttttgattttggatgagccgatcaacggcctcgatcccatcggtattgcagaagtacgctcctttattcgggagctttgcgacgcaagaggaaaaactattttgatttccagtcacattctttcggagatttctttgctggctgacgatattggaattatcgaccacggcgcgttgctggaagaagaaagccttgctgagctggagcaaaaaagcagtaagcatatccgttttacgctctctgatactgcacaggcggcaagaattttggaacgcaatttccatgaaaaccatttctccatacaggacgaccacaatctgcgcctgcacaacctggatctgcctgtggggaaaattgtaactgcctttgtagaaaacggattggaggtatcggaggtgcatacttgtgaagaaagtcttgaagattacttcaagcatgtgacagggggagaaggaattgcttaaactaatcaaatgcgaatttttgaaattgaaacggaagaaatttattccgctgattattttggctgcgttcctgtttccaatcccgctgacttatctgatgacaacgccctctatgatagagcgatatacggatcgggcagatgctttcgatggactatttaacatggtgttgggatatggtatccagtttttactgccctgcattatcggagtgattgccgctattctgttttttatggaacgcgacaacgatacattcaaaaatctgcgtacaattcccgtaaccagcacgcaaatggtacttgcaaagattattgtcctttttatctttggaattgttttttgcgtggcttctaccattgcaacaattctttgcggaattggaacattggaagtttatggaattggttataagctgtttttggcggttgaaacggggatcttcattacggcaggaacactcccgttgattgtccttgttgtctttttcagtaagacctatgttttttccattttgttgtgtgtcttttacagcgttctgaacatgagtgctacggcattgtttgacacactgcctaaaactatgttatggcttctgcccacgccactgactacattttggagtgcgggagatatggcggctcatggaataaaaatggacttggagcaaatgacagggctaattccctcaacatttcaagttgtattcattcttgggattatggcattcgtttcgttcttactgattgacagattatataagcagaggggggaataaacatggttcgcattgtaaaaacagaattttataaattggaaaggtatcatatcctttgggcgggcgttgcactcatgctcttatccgtcctgctgaccttgtttacctctatggcgaatgatggttccgtttgggattttgcctatcttacagaacaggtcatcaaaaacaatatgtccatgatttttccgatgtgtatcagcctaattgctggatatatgatttctcgtgagcagacggatgacacattgaaaaatattctgactgtgccgatctcttttaagaaactgttgaccggaaaattgattgtgtgcggcgtattgtctattattttcgggctgatatgcagtctgtttacaatcatagcagaaatgattgtgggatttcctggctttgagatttccttagctctaaaagcagccttgcagattactgcggttaatttctttttatatcttgcggttctgccgattatcgctcttacttgtcggagggcaggcagctttttagtcggtgtaatcattgcttttgtctatggatatggagggatgtttgccgcaggaaatatgacattagcaaacctttatccgattaccgcaagtcttggaatggtaggctaccgtagctatgataccgcagtcaactggaatatcggaacctgttcttgcagtcttgcgcttgctgtcgttatttctgccatcttgattttgtgcatgaaagaacgagaagcaacccaaacaaagaaaaaggccaaaaaggtagctccaaagaaaggctggtgatgattttatgaagaaaatagttttagcattaacattcgtccttgtgggaagttttatgcttgctggctgttcaaaagatgaaattctcaatcattacaataacattgttcaatctgcgggctccatagaactgacagggaaatcgtcactgcaaggggaaaaagaaaaaggaattgatgattatacagggacttatacggctgattatgcgaacttttcaggtacagagtatttgttcggaggaacttccataaaaagagaagccggtaaggagctgtctattgactgcgcgctggaggttacggagggaactgcaaaagtattttggatttctggatctgatgaagcagtcacgttgattgaagcaaccggaacttatagtgacacaattacacttcctggtggtggaaattatatcggaattgaatgcgagagtttcacaggaagcattgaattaaatattgaataacattctgccggacgacggcaaaggaaaaaaagccgtcgtagagcagacaatttgacacgcccatttgaaacggcggctttgattttcagagccgccgtttctttgcgcctacacacaaaccaatgacgacttgcagggacacggtagccgattggaggttattttgccgtgtccttttctctttttcgcagtatccatgatctgcactagctaaaaaaagcgtagcccctccatcggagcagtccggctttggatatgaactataccatgtaagcaatcttctttataaaacatttctgcgtccagcaggtctgttgcgacttgctgggcgctttttgctgttttccgaggacaggcccgcctcgaaaaaaattttgagaaattttcaaaaaggaggcttttagcgggtagcgagcggctttgcgttcgccttgttagcggaaagggagaaacccacctcattcccccaggaaaggaggtgaaaagatggatatgatccaccgcaatgactatggcgagcggtgccagttcgatgcttactgcaagctggtactgtaccatgaggcaatcgactaccttcgggaaatgcagaggcgccgtgataccgtatcttatccctacttataaagcgttgcagaagtccaaaaatgcccgcaaaataagaaaaacagaggatgttcagacaccctccgcttcttcattcggcttttcaacttttaaggccccgtcaatggcgccttccacgataggcaaatactgttccaggtagagtttcaacttctgtccgacccgctggcgcagctcgctttcctctcgcatgacctctggattgaaatatctctccatcggcaggctgcagatttttacaagctgtatgatgaccggcaggctggggatcgtgccctcgttttcaatgttggcaagatacctggtatcaatattcaccttttcggctaaatcttttcgtgcaaggttcttcgccttccgtgcttcttttacatccgcaccgaaagtttcaaaaccggggcaatcttcgatttttgccatattgcatcacccacatacattctatatttcatagtctgcctgtgtaatgttgcgatatgtgcttgttctaaactttatatttcatattaccgattgagcaatatatccgagcttaatagcttttgttatcatctcaacggtagagctaacttgtaatttttcaaaaatgtgttgcaaatgatttgatactgttcgttcactaataaaaagctgttcagcgatttcgcggcgcctaacgcctgatgcaaccaattcgagaacttttctctccccgtctgtcagctcttctataaatacttcttcccgtgggaagtgtgttgccccatctttgatggtcaataaaatatgcaataactcatctggttctacatccttactgataaaccctcttgcaccgatcctctttgcttctttgcgataaacaggaagattatagccagagagaatgactattttttgatctggaaaacgctccaacaaatgttgtgtgagcattaaaccgtcctcgtctgtcagtcctcctaagttaatgtcaatcagtaaaatatctggtagttctgtggcaatttgtttttccaaattttgaatatcctttgtactggaaaattgctcaatctctggattatcacacagggcaatcgaaagacttttggcaaaaagtatatggtcatcgaccaacaaaattttcatacgaatcacctccgttcataggcatagaaatgacaactgccgttccgccgccagtagcgggttggatgttcatagtgccatctaataaactgacctgttccccaatagaagcaagcccctgatgtgaacctgacttataagtgaacggtttgaacccaataccattatccgttacctttagggtaatgcgtccgtcctcctgcatcagcagcacatcgattgtcgttgcggaggaatgttttaacgcatttgttaccagttcttttatcattcgatagatgagtacattatatggctctacaagaaatacatctttatcgcagtccaaacatatatttgcagaatggttttcttccattgaatcaagcagattttgaatattttcctttaaggtcagactttttaccagatttgggtgataagtctgcatttgaaaacggatggaagcatttaattctgtcaacgtatcgagaagtaacctccttatctctggctgttctgctttacataacatgtttttgatggaaagcaagttttgcaaaatattatcgtgcaaatagttggaaaaatctttttttaagttttcttcccgtttaatctgttccagtgaataggcgtagaagtgctgacgatccgtggggttattatagttggtcggctgtctgcaaatccgcacatacaaaaggatattgtaaacctgtgccagcagaaccactatgtaaacactcatcaaaattgccataagggggatttgaaaaagatatgccattccaacaagtccaaccaatccgacaaaaaccagagcaacgatatatccccctgacagcgataaaaattgtacctgctgcggatggtactggaatacgatactatgaatacatacaaatgccagcataacgggtatgtagcttcccatacttgccatatattccgattccctgtgaaaaacggaaaggtatattacaaatggaattactacaagagccagtggaaaaagcagacgtttccattgacttttcagcacaaagacaattcgttttctctgcatgatacccacgacagcaagagccagtgtcgagataaaaaattgcagttggtaggctgtgaaaaaagccctatctgaaaagaagaagcaaataattgctgttacgcaggaaattttcaaaaaagcaagcagcgctttttgcccccgataggcagaactctgaaataaaaatgtctgtatgaaatatgctgactgataaaaacagacaggcaacaacagcatggaaaccgctttggatattggtcggaaatcaaacaggtacaataaaaattgccagcccagcaacaataacaataaggaaaagtggttcagaaccttattacattttacattcttatatgagatatacgccgcgtcaaaaaacaagagcgacaaagatagaaaatgaacaaggtaattgctttctatataatgtccgttgtacgctataaagccgagataaatgatcacggcaaattgattcaacacacaaataatctgtcttgagaaatatgtgcttttcgtatttttccccccattccttttctaatattgtactgtcctttcccaatgagttcaaggttactattccaaaatatttttgaataaaccaacggctgacactgatgaaagtgccagtcgccgctttatatcaaggcaattttatagcaggaacgttttgttagctggtaatagatagcatagataatggagaagatcgccaccgccaaaaggatcggcgcaacaacggcactgttccgtccgagtagatagtccatcagtgcagacttataacaaatcatcgcaaaaatgctgtgcagcgatccaataacatagggaataccgtaataaatctgtatctgccgacgcacacattttttaatcattgtgtgactatatcccattttcagcatgatttcatagtccggtttgtcataggttacggacgaaatattttgaaagtaaagaatactgcccgtagcaattaagaaaataatcgtagtaaaacaaattagcaaaaaagtggaacttgcatcgcggacaaaggtactttctctttgccatgcgcttgccagataaatgttgtccggcatagacgctttcaaagctgtgtaggcagtttcattagagcgcattttttcaccattaatactgataaccgaaactctatctatggtactgtcacgcattttttgataaaggttatccgacaaaatcagcgttccaacactgtttgaaaagccaataggattatcaatgcttgtctgttttactgttacatcggttattcctgttccaaagtccagatgatacgaggctcccatgtcagaatgttcatggtctggatagtatttgattaaaatgcaatccgtatctgataattctggaatatccgctttctttccctgctgagaaagcagggtggcatagtctgtccggctgatacattcaaatccgggaatacgccccttatcttcactgatactgtattctgtcggcagacgatcagaagttgcttttactttgaaaataatcgtttcataaacttcgtattcctgttcgtcgcaagcctcctgtaaagcctgcaaagagatttccttttcctgctcatttgtcactcggtattcaatggcagaggggataatgcgccggaaagattggtatggataccacatagaaagaaccgtcgagccaaagaccgccagcgtccccgctgtcagtaagatcagcaaaatcagtgatttcgcattagaacggatgcggtgcataaactttggcactacaataatggtattttcatggtaaagtctgctttttttctgccggattttctgacagacatagggtaggaatgagtacataaacagaatcgttcctgccacaacacaaagaagtgtcagcatggcaataggagaaaatccaatggtattccacaatgactgctttccccgcataatgtccaatgcaaggccgtaccctgcgctgagaaatccgacacccaatatcgctgttattgcatggggatggatcggtttttccgttttcttttccagtcgcaccaaatcaagcagggtagattttcggagcagacttgcgttagaaagtgtaagtgtaatcagcacgacgattacaaaggaaaggattgcctttactgctgccgggtaaattagagggattgcgcgttgatctacggatattcccaaaaggatcacaatcccggcgattacgattttgtggagaatactgccagtcagaatcccaagaatcataccgccaaagcagatcattacattttcaaagatcagtaatttcaatatagttgattttcgatacccaagtagcgaataaatccctaattctctcatacgtcgccgcataaaaaaactattggaatagaacatataaaaaatgacaaatgccatgatgaatactgctactgtccggcacatggtttccactctgccatccgaagatattttttccatgatgatctggttcatggaaaatgaagtaaagcagaagtaaatcatcaagacaaaagaaacggaaaaaaggtacagggaataaaacgaaaagttccgtttcagattttttaaggcgattgcggataatttcatgttgccaccccccttaacgcttttcgtcctgtctggcggcttcttgcatgatttcctcatagaattcacggcgttccctgttacaccgtttcaattcggaaatgatatgcccgtccttaaagtacaaaatgcgatctgtatagcttgccgcatacgggtcatgtgttaccattaaaattgttgttcctaaagcctgattgacttctgagagggcaaagagcagttccgttgctgaactgctgtccaatgccccggtgggttcgtctgcaaaaattaacggcgggcgttttaccattgcacgagccgccgctacacgttgccgttgaccgccagacaattcactgggatattttttcagttgtgaagcaattccgaacagttccgcaagctccatcacttttttatcaatcgtctttgcgctttcatggagcaaagtcaagggaactgcaatattttcctgcacagtcagactgtccaacaaaaaatactcttgaaagataaagcctagattattcttacgaaaatcggctgcctgtgtttgactaagctcttgaatttttttccctcccatgcggatgctgccgcttgtaggaatatcaatagtggatagcacattcaaaagcgttgttttaccggagccggaagctcccataataccgagaaattcaccctgcattacttcaaaagaaacatgatccagtcctggtttcggctggtttggatagattttggtgatgtcttttacttctaatagtgtactcattattgatcgctcctttcaatgtacacaagcagtatatcgaacacagtaaaaaagtgcatgagtaaatcacgcagaaaacatgcgtgatttactcatgctggatttgtcgttccttgatatgatattcataaaatagaaaaagtcatatctgtcggacagcgacaaaaggaaaagccgtcgcacggcagagataattacggaggatgggaaaagagaaaacatgaaaaaacatcttaaattatgcgtaataagctcaatattttttgccctactcgtttatttgatctggggtaatacagcgttgacggtaagtaacataaaaatttcaagtagccgtattcctatcgcattttccgggttccgaatagcacaagtatcagacctgcacaacgcagaatttgggaaaggcaatagaaagttgctggaattgctgtcagaaagcaaaccggacattattgcaataacgggggatttagtggacgcagggcatacggatattggtgtagctcttgattttgcaaaagaagcggttaagattgctcctgtctattatgtaacaggaaaccatgaagcaagcctttcacagtataatgaactcaaagcaagacttgaaaccattggcgtaactgtgcttgacaatgatgccgtacaattaaaccatggcaaagaagcaatatcgcttattggactttctgaccccgattttacgataaaaggagatatattcggagaagtcccggctatggttagtacaaagctgaataatcttgctgatgatgaaaacagctacaccattttgctgtcgcatcggccagaattgtttgaaagctatgtacattgcaatattgatttggttttaagcggacacgcacacggcggtcaattccgtttgccatttatcggcgggttgatcgcacccaatcaagggctatttccacagtatgacgcagggctatatacaagtggcagtacaaatatgattgttagccgtggattaggtaacagcattattcccatccgttttaacaatcgcccggaagtcgttgtaattgaacttctcaatatggactgttaagacaaatttatagaaaaccgaattataaaacagtctgccgcgcgacggcgaaagaaaaaaagccgtcgcagagcagacacattttcacgcgcctatgaatcggcggctttgattttcagagccgccgtttctttgcgtctacacaaaccaatgacgacttgcagggacacagtagccgattggaggttattttgccgtgtctcgtttgctttttcaaagctcacatgatctacatcagttaaaaaaagccttgcccctcctccgggcaagtataacattgcatcggcattatcgttccatgtaattcagtataataatggctgttcttggcgtgccagttttccctcatggaaatctggcgttttttgttgccattttttcggagatgacccggttgtctgccggtgtcggtctccgcctccattcgattcacccgtcaatcacccgtgaatcgaaatggaggtacataatgaagaaaattaaccttcgggaactttatcctaatgtttatacaacagacttttttgtagatgtgacagaggaagtaatggagactattcgagcagctgaacgtgcggaggctgcgtatgagcgaaagatgtatcgttataaagcacagtattctctggattgcgagaatggcattgaaaatgcggtgctgttgaagccgcaaacaccggagatgcttctggaggaaaaacagtttcaggagcaggtctatgctactgtgatgaagctgccggagaaacaggcaaagcgaatttatgcccgatactatctgggaatgacggtaaatgaaattgccgaagtagaaggtgtagacccaagccgtgtccgagacagtatccgccgtggattaaagcagcttgtaaaatatttttgataaaattttatttgatgcgcctgttttttgccttttttgtcagtgttaataagaaggacaagttttcctccttcatcagtacattgacaatcgaatagacagcacaacaggtacataacccatgtacgagcgaatatgaaacgccgcgaagatggaggagtcagggaggtgatgaaaagacttcttcggagcgatctacgatttcataaaacggattgtggcagattcggcgcgatgactgcatgggggcttaaagatacttcctcacggcccgccaaagacttggggggaaccctgcggcacacgatacgaacggtgctgcggagttatgacagccgcgccagcggagacctgttgtgttcccatcgtcagggggcgtggcaaatgtgatgaaagctgagttatataaataggaagcgtttgcagcttcctgttcaaaatcagataccatgcgctggcggtttcggctgccagcgtattcatgtggctttgaacaaacatgatgacaaacttgacagattggaggaaatatgctttatggaaaaacttattacacgaaaagaagcagcaaaaattttaggtatcagcattgcaacgctggacgcggcccgtaacaatggtcttatttcttatgtgcaatatgtgcagaatggctgtgtgtactttacttcagcgggccttcaggagtatatcgcaaaatgcacccacagagcaaagccagcagaaaagaacgcaacttatcgtaaacctcgcagagctggagtgtgagccggtccgtatccttgtcgaaatcataatggtctgataaaacatagatacagcgctggagtctattcttaggaggtgacggaattggccaaacggcaaacaataattcctcaatatggcacagttatgaaaaggggtgtcctatattataggaccagaatcaaagacgcgaatggtaagctcgtagctatctacgcaaaaacacctgaagaactatacaacaaagaaacgcttgcgttggaacagattgagaatgccacttttcatcggaaaacgcccacagttgcagagtattgtgaaaagtggctgctgatgcagtcggttcatgtacgagctactactttgacggattacacctcaaaggttaggcggcatattatagcggaattgggagataaacggatgggtgaggttagcctggatgatattcagcttgcccttgttccggtttccaaaaaatctgcatcggtttataaatctgtggtaatcctttacaaatctatctttcgcgcagcgatggaaagcaggattattgaccacaacccaacgatttatctgacaacaaaaggtggcggtgttccacaagaggagcgtcaggctttgacagatgaacaggtggagtgccttttggatgctatccgagatttaccgccttatgtctttgtcatgattggtttatatgcagggctacgccgggaagaaattcttgttctgcaatgggattcagtatatctggatacagatactccatatctgacggtaagacgggcatggcataccgaacataacagaccggtgatttcggatgaattgaaaaccaaggctgcggagagaaatatcccccttcctgtttgcttggctgagtgtttgaaagcagcaaaggaaacttcgacttcggagtatgtggtttcaaaccgggatggcgaaccgctgtcctacacgcagtttaagcgactttggcagtatattgttacgaggacggtcaaggagcggagctattatcggtatgaagatggaaaaagagtaaagcatactgtcacacctgtcttgggagaaaaggctgctcataacggaaaagtggtttacagtctggactttgaagtaacaccccatcagctgcggcatacttacattaccaatctcattcatgcatcggtagatcccaaaacggttcaatacctggcagaccatgaaagcagcaagattaccatggacatttatgcaaaggttaagtacaacagaccagatgagctggtcagatcaatgaactgtgcgtttgcaagctgggatgcagcacagtaataacaaataggaaatgaagcaggagcgaggcaaggatgcctcgctctttgttttacctcagccgtatctttgattaaatcgaggctttctgataaaaagagagtgtagatacggagactacacattatcaagagaggacgatcaaagatggcaaaaaagaaaacacagatcccgaagtacgggaccattacattgaaaggaatccagtattacagaaccaggattacggatgcagatggcaaagagttgagtttgtatgccgcaacttgtgaagaattgtatgagaagcagttagagacccggaagcaggtggaagaaattatctttcaccggcagcacccaacagtagccgagtatggagagaagtggctgctgatgcagtcggcaaaggtgtctgcgtctacactcagaggttatacgagggatatgacaaactatatcataaaacctctgggagagatatatatggaagaagtgaccgctgacgatattcggctggcgcttgttccattgtcaaagaaatcggaaggcttatacaataaggtcaatatgctactcaagtgcattttttatgcggcagagagaaaccaaattcttgaacacaatccctgtgcgggaatatccggtaaaggcggaaaaccgacaaaaaagaaggaggcattgacagatcagcaggtagccgtgcttctggatacagtcaagggacttcctccatatttgtttgttatgctcggtttgtattccggtctgcgtcgggaagaaattcttgcactgcaatgggattgtgtatttctggacgaggatacaccttatctatcggtgaggcgggcatggagtacagagcataacagacccgtgatttctacggtgctaaagactccggcggcaaaaagggatattccgataccgaagtgtttggtggattgtctgagagaaacgaaagaaaattccatatcaaattatgtgattgctgacagcaaaggggagccgctggctgcttcgcagtttcaaagagtgtggcagtatgtcgttgcccgctccactaagccccggaactattataagtatgtgaatgggcagagcatcaaatacacggttaccccaacgctgggcatgacccagaaaaatcaacccaaaatcagatatacgctggactttgatgtaaccccgcatcagctgcggcacacttacattaccaatcttctctatgctggtgttgatccaaagaccgtccaataccttgccggacacgaaaacagcaaaacaactatggacatctatgcaaaagtgaagtacaataaaccagaggagctgtttggggtagtaaatggtgcgtttcatcaggctattgctgaatgaaaaaaggccgttttttatggtccgcacaccggataactgagaggcagaaagccggaaaagcccggagtatcaagggaaaacagctcaaaaactcgcgcagtacggtctcaaagcagctcgtcgcgctccgcagttcagcaagagataggatttaccgctcaaatgtctttacggcatttcagaaaagtgtattgcacctcggaatatcggttccgaggtgttttttatgtgaactgtgatattattataatataatgataaaagaggttatttgaataggggaatactcatatgacgactgtaaatacaaaaagcggcaggattataaaagttgtatctagggaagaagagaaaagtacattgacggaatcagatactgaaatggatgaaagagcggttgaagctgttaaggcagcgataaataaagcaagaatttgtaaaaaaccaatagcaggttatgataaagaaaagaagcggtcttatgttgagcatgcaaatggggaaagaaagtatccagaatagaaaaccgatgattcttgttttagcaggatcaaatggctcgggaaaaagtacaatacaaacgccttgtcatgatgctgggcagtacagtgctgattgcgtgcggtatcttcttctatcttcttttctcaaaggtgaaaagcgtgatctgcttctggcaggggaaaatggaaattattaaggtgtgaaacggctgccggatatttttgatgatattatttaatgtacgtgaagagtaacaccataagcggcatcgtgacaatcgcgcacagcgtggtcacgacattgatggcgcttgcatattttgcgtcatttccatatacctggcacatttgtgtgaccgtggatgcggaaggcgtaatcactgccagaaacacaatgagcataatttttggcgcatcggaagagagtgctgcaagccggcttagcttaatcagggcaagcgcgatgagcggaataacaatcattcttaaagatgaaataatatatacgcgtttatttccgaaaatttttttgagatccattccggcgaaaagcattccggtcacgatcatactggctggaccaatcatatttccaacgcttgagagggtgttgtttaatatttcaggcagatgaatttgagcaaaaaataaaaccgctccaagtgcaattgagatcatattaatatttaaaacaatttttctccagtcgtaggaagtctcccggctgataatcttcttgcagtgcgtccagatgaagatgagctgcacactcatgaaaacacatccatatagaacccattcttgtccaagaataaaagttacaatcggaacaatcaggtttccggagtttgagtaataaatagaggcaatctcgacttcatttaagcaaaaaagtttccccatgaaggagactataataagaagaagtatctgaagcatcacggatgcgataaaggcaatcagaagaccatgtacagtttcaggagtataattgacctgaaaggcattgataatgacacagggaataatcaaatacagcacaattttagataaaaccttgctgtcctcatccgttacaatcccggctttcacaatgataaaccccattaatatcatgagaaaaagctccaaaatctgttccattaaaagtaaactcatatgcataaaatcaccgtacccttctactataaatcccattgtctgctgactatcatagagctttcgatgaaaaaatgcaatgtttcattttgccggttacgacaatccggcacagagaacaatgattgataaaataatgcttgacatcctcgaatagattgtgtacaatctaaacacaaaaagattgtacacaattaaaaatgaaacaatttaaaaagattcatttttaatgacaaagagaaaggagggtaagagatgggcatttatgattattctgtggagcggccggacgggacaacgcagccgttgtccgcttatgagggaaaggtacttctgattgtgaatacggcgaccggatgcggattcaccccgcagtaccgggaactggaggagttttaccggaagtatcatgatcagggacttgagattttggatatcccgtgcaaccagttcgcgggacagacgccggggacggatgaggagattcacgagttctgtacgttgaagtatcacaccgagttccctcagatgaagaaatccgacgtcaacggcgaacatcagattccgctgtatgcatatttaaaatcccagaagggatttgccggattcgggaaaggggcgaaagcggcggcgatgggaataatgctccgcaaaatagataagaattataaggagaatcccgacatcaaatggaattttacgaagttccttgtggacaggcagggcacggtagtggtaagatttgaaccaacaggagatatgagaaaactggaagaacagattcttacactattatagaagcaaaataacacaggaatggagaatggtatggaacgagtagatattgccattattggaacgggaccggcaggtgtgtcggcagcgattaccgcgaaagtgagaaataaaagtgtgctgttaatcggcagcagagaactcagcgagaagatgagcaaggcgcatcagattttaaactatccagggctgccggaagtttcaggagcagatctggttgccgggtacaagaagcagttagcaggtcttggcatcgaggtgacggagaagcgcgtgaacgcggtctatgcgatgggagattattttggaatccaggtgtccggcgagattcttgaggcgtccaccgtcattctggcggcaggaatcgtcatggggaaaccgttcccgggagaaaacgagctgttaggaagcggcgtcagctactgcgcgacctgcgatgcgcagttcttccgtgggaaggaagttgcggtgatcggatacggcagggaggcggagcaggaagcagactatctggcggagattgtcggaaaggtgcattatttcccgatgggaaaagaggagccgcagctgtcggatgccatagaggttgtgcatgagcggccgaaagcgatcacaggcacgcagacggtaagtgcgcttgagacggacgcgggttcccatccggtggacggcgtatttatcttaagagacgcgatcgcaccgtcacagctcgtgccgggacttgcgacggaggagaatcacgtaaaggttaatctccagatggagacaaaccttccgggactctttgcatgcggagacattaccggaaagccgtatcagtatatcaaggcggcaggacagggaaatgtggcggcgctgtccgcggcagagtacctggataagaaaaaaagagagatctaaggaggattatcatggttaagaagattcagaacaacaatatggacgaagcgttacaggcaaaggcagcagtggtggacttttcggcagtatggtgcggaccgtgccagatgcttgccccggtactggaggaactggcggatgatctggacggtgaggtggcattttacaatgcagataccgatgagaatacgcagcttgcgatcgcaaacggcatcacaaacattccggcgcttttattcttaaaggacggcaaggtggcaggcaagaatgtcggattcatgccgaagccggaactggaagcatgggtaaaaggatgtatggagcagtaacagcacacagaagatacggagtgaacacatatgggatttgacgaggaacatccgttagcgacgatcgtggaaagcatgttagagcgcacgcatctggattataaggagacaccggacatcaaatggaactttaccaagtttttgattgacagagacggaaacgtggtggagcgttttgagccgacggcggatatggatgttgtccgcgaaaagattgaaaactatttataagcgacaggtgccggaatgaaagataagtatgatgctttaaaattagaaaatcaactctgttttccgctgtacgcatgctccaaggagatcgtgcggcgctacaagccatatctggatgagattgatctgacctacacgcagtatattgcgatgatggtgctgtgggagcatggcaggatcaatgtgaaggatatgggggcgcttttgtacctggattcggggacgctgacaccggtgttaaagaagctggagcagaagggctacctcaccagagagcgtgatcacgcagatgagcgtgtgttaaatgtgacgatcacggaggcgggagagcagctaaaggagcaggcggtcgacattccgcggaagatgggcggctgtatcggactgtccggggaggatgcgagggagctgtaccgcatcctgcacaaggtgcttgcgttgatggagcaggaatgaaaaggccacggtatgaaaacagtagacaatatacaaaaaactgatataatgaattcatacttatttaaaggagagtttgttatgattgagagaagaaatattgcggtgtgtattgtactgacacttgtaacctgcggaatttatggcatctactggatcgtgtgtctgaccaatgacgtaaatacggtttctggtgatgtgaatggaacatccggcggtatggtggtgctgctgacgattgtgacctgtggaatttacggcatttactgggcatataagcagggagagaagcttgactttacaaagaataaccgtggaatcccgtcaagcaacagcggtgttttgtatctgattctccagatttttggatttggaattattgcatatgcattgatgcagaacgagctgaataagctggcataacagatcggaaatgtaggatgacgaaaaaagcacgtttgaaaaaattgctgatgaatatatttttactgggaatggcgggactgttgtacggaatattcgtgtcgtacacagggctcgccattccctgtctgttccggaaagtgacgggactgttgtgtccgggctgcggtgtgacgggaatgtgtgtggctctcctgcatcttaactggaagggggcttttttctgtcatccggtgctgtttgtgttgctgcttccacttacggcagtatttatctgcagtgcggcggggtatgtgcagaatggcagattccggttcgcccgctggcagaatctcattctttacgtcagcgtcgccgcgcttgtaatcttcggtgtggtgcgcaatctggtgcgttttttgtgaaaaacaggaaaaaaatagattcagaataatttaacgtggtcaacacatgatcttcacattggctttctatactacccctatcaaaagaaaacagacattgacagagtcagagaggaatgaagatcatgaaatggaaaaaattagtaacattgggctgcatcgtagttatgacggtatcatccgtaacagcatgcggcagtaatacaacagagaaccagacggtagaagcaacagagcagagtgaggagaaccagagcgattctgtgatcgtgcaggttacagcagttgaaggcgatcagattacagcggatgtaggaacacttacaaccgcaagcgcagatgcatccggaaatggagcaccgggcggagaagcaccgggcggagacgacagtggaaacggagcaccgggcggagacgcaccgagcggagaagcaccgggcggagacaacagtggaaacggagcaccgggagaagcgccaagtggagacgcaccgggcggagacgcaccgagcggagaagcaccgggcggagacgacagtggaaacggagcgccgggagaagcaccaagcggagaagcaccaagtggagacgcaccgggcggtcagatgccgggcggcagcagttttgaggcttccggtgagagcattacctttaccctgacagacgatacggcgatcacgttagagtacctgcagggaagcgacgagggaaccgcagatgacattgcagtcggcagcgtattggaggtagttctggacgaagacaaccaggcagtgtctgtcactgtgcgcaacttaaatgcaggcggcggatttggcggaagcggtgaggtgacaaacggaacttctgcaaatacgattaccgaggataccgaggtggatagtgagacttacacatccaccggtgatgatgagaacgcacttcgtgtcgacggagcgactgttaccttaaaagatatcacgatcgagaagacagccggctcctcatcgaacacagaggatggagatttttacggactgaatgccggacttctggtgctaaacggcgcaacggcaacgattacgggagcgacggtcaataccagcgtgacaaacggtaacggtgtgttcagctatggcgagggcacggttgtaaatatttcggattccacgatccgcacgacagaaaataattccggcggtatccagacgaccggcggtggtaccatgaacgctgcaaatctggatgtcgagacacagggaaattccgcagccgcaatccgaagcgaccggggcggcggtacggtcaaggtggacggcggttcctatgtgacaaacggaacgggaagcccggcaatctactgtacagcagatatcagcgtgtcagacgcgactctgacagcgaatgccagcgagggcgttgtggtagagggcaagaattccgttgcattgaccgactgtgaagtgacaggaaatatgagcaacacttataacggcgattctgatgaaaatattcactgcattatgatttaccagagcatgtccggtgatgcagatgtcggagaggcaaccttttctgcagaaggtggcagcattacggcgaagacgggagatatgttctatatcaccaatacggattgtgagattacgctcaaggatgtcgcatttacacttgccaatgatgtattccttcgcgtggaaggcaactcttcctcccgcggatggggcacagagggcgcaaacggcggagatgtgacgctgacggcggattcacaggagtttacgggcaatattctcgtggatgagatttcaagcctggcacttaccatgaagaacggcaccagctacgagggtgccatcaatccggacggggacggcggtacggttgacgtgaccctggatgacaactccacctggacactgaccggtgacagctatatcacaagctttgacggtgatacctccaatatcacggcaaacggatatcatctgtacgtgaacggagagcaggtactgtaacagattggagaggcagttgaaaaagaggctgccacatatcacaggtggcagttgatgataagtaatattatgagaagatcacaccgtgggatttcagatggaaatgcggatggacattcggttcaaaaaatgtggcatttctaaccggtcggatgtctgcatcttcgatgatccgtgtctttccaagtttggagcactccgcgggtcatgtccgcatcccggaagacaatttnnnnnnnnnnccgcgcttgcctgtactcccgcaataaaacataaccgcgcgaagccgatgtctgaattgccatctgccatatttttaatagcagatggcaacgagtttcggttcgcgcggttttatattgtctatgagggagtacagctagcgcggttaaaaagtccgcccattgtctccggtgtgccggacatgcacccgtcggattgtccaaacgtggaagagacacggaatccgatgcagacattcaaccggaagaaatgctcacatttttctccaacgaatattccatctgcatttccacatgaaatcctcaagtgtacttatcataatattacttatctcgtctaacaggacgatctgctgaatgcggcagctttttttcaagagagagattatgtattttagtggaattatatcagacgctccggaagaatttcggatatgtggaaaaaggcagcaaaagtgtgctatagtgaatgaaaagaatacaatcatactggaggggagcagagatggaactgctggatattgtggacgaaaagggaaatccgacaggagagacagtgccgcgggaggtggcacaccgtgagggaatccggcaccgtacggcgcacgtgtggatttttcgcagacgcggcggcgtagtgcagatccttttgcagaaacggagcgacaataaggattcagatccgggctgttatgacatttcaagtgccggtcatattcctgcggggagtgattatattccttccgcggtgcgggagttgaaggaagaactgggtgtggacatgaacggcgatgaactgatttattgtggacaacgccggttccggtttgagagggaattccacggcagcatgttccacgataaccaggtcagcaatgtgtatgcactctggcttgaccgcgaggaggaagcttttgtactgcaggaggaagaagtgtctgaggtccggtggatggacttcgcggattgcgtatctgctgtccgggagaaccgaatttcccactgcatttacatggaagaactggaacttctgaaaaatgcactgcatctgcattgattcgaggggaggcagggaaaacggctcagtatttccagcggagatccagccggtagtgtccgtccttcactgtgatcggcagatagtcagagtatgtctcctgtgcctccttggagtaatagcggatggtaactgcggttgcccagggggtgtcgtgatatacggtagttccctccagcaacgaaagatcccccacgtttttacggaaatacaccagatcatcatgaaaatattcttctgtgtcttccgcggttacagggatatctctgccgttataagaaagcgcggcgagggagccataatcctcctgctgtaaaagcgcgcagacctgtgcggcaaaatcatcggtatcctcccggcagacatatttgccggttgaaaatgggagaatgtgccgtctggccggaatgtacttcaggcgttttggatcggaacttttatagaaaatggtgccaagtacagacgagccgtctgcaccggcgcgtgccacgcggtttccggtgaaaaatgcctgaccgagtgaaagatctgcagtatagcgcgttccatcaacctcatattgcacggttaccaggtaatcggaaaaacgtctgatgataccggaatcgtaggcaccgatactctggtcatattcggtctgctccacatgaaggacttcgtaatcatccggcgtgagccggccggtataggcgatacttaaaaagatggtctgaaaaagagtaaaaacgagcccgagtacaaccagccacagggcgagatagagaataccgccatatctggattcgttgatgaaacgcccgagacgggtcgcacaaaaatgcgaaaaatgggggcggaaccatcggttgtgattgcccgggctgtctgaaaatgttgacttcatagaaattctcctgaatataatgagctataaacgggtttgtgaaagctgtatcaatagcagtatagcaaaaaaaggcggaattttccactatttgacaggcgggaagagctgtattaagataagggacagatttctgacagagggagaagacagttggagcagataaagtattatatggcacccatggaaggtgtcaccggatatgtctaccggaatgcatacgcaaaatattacggcgggatcgtacgctattttacgccgtttgtggcgaataaaaagcttggacaccgggagaaaaatgacgtctgcccggaacacaatgcgggaatggcggtcgttccgcagatacttacgaaccgcgcagaagattttctggcgatcgcagagattctgcgggagtatgggtacgatacggtcaacctgaacctcggctgcccgtcgggcacagtggcggcaagagggcgcggcgccggattccttgcgatgccggacgagctggatcattttctggaagagatttttgaaaaatgtccgctccggatctccatcaagacacggatcggaaaagagaaccctgcagaatgggagcggctgcttgccatatatgaaaaatatccgttagaagaactgatcgtacacccgagggtgcagaccgatttttataagaaccgggtcaatctggaggcatttgcacgagcagagaaaaacagcagacattcgctctgttataatggtaacattgtggacgcagcgtccgcggcgcacatccgggagggctttccgtcggtggataagttcatgatcggccggggactgataaagcacccttggcttctggaggaactttccggcggcagacaggaaaagcaggagcgaaaagagcgttttctccagtttcacaatgcgatcctggagggataccggcagcagatgtccggggacaaaaataccttatttaagatgaaggaactgtgggcgtactggggagaaaactttgcggatgcggaccagcgtctaaaaaaaatccgaaaatgtgagcgggttgctgagtatgaatgtctggtggacgcgctgtttcgtgaaaaagagctgtgcgtgtaggaaaagagtggggtatgcggcaatagatttgtgtgatataacaaaaaagaagctttccaatctgtaacatttatataaaaagacgaaagggactttttatttgctgtaaaaagtattatactgtactccgtagtatgcttcatgagaacgataggggaattggggaagaggttttaaagagggtatatggaaagctatacgttagaggagaaagtgcttcgcaaggtcatgcggaatattccgatgggactgattgtgagcaaagagggatttcggcgcaagatttactatgtcaacgacacggcgtgtgagattatgggatacacgcgggaagagtatatcagaaagatgcaggacggatggacggatctgatggatgtcgatctgcgggaggtcatccgcgagcacaatgaacagattcgttccgggacgccgtttgaggtgctctcaagaccgcagacgaagaacggcggttacaagtggatattaagcagggtgaatgtgcagatgcaggagggaccgctctgctatgtcagctttatggatgttaccgaccggatggagcgggaggaactgtgccggcaggagaacgaggtgctcagggagcaggcgatgcaggactcctttacgaagcttctaaaccgcggcgcgctggagaagcatgtctgcgaggcgcttcaggagagaggcggcgatgaggaggatgcattcattcttctggatgtcgataattttaagcagatcaatgacatttacggtcacggagtcggggatatgattctgatgcggatggcgggaatcttaaacgaagtgtttggagaccattcctgtatcggcaggatgggcggcgatgaatttgctgttttcctcagagacatcggcgaccggagagagattgaagagaagattcaaaagcttcttacggaggtacgcgccgaaaaagaacggatgcacctgagcaaggaaccgacagccagtgtcggcgttgcatttgtgccggaatcgggaagcacgttcgtggatgtgtaccgggcggcggatcaggcgctgtatcacgtgaagaactcgacgaagaatggaatggcgttctatgattttgtataatttttcctattgaaaaaaatcatcatatactgtaagattaagatgttatatgactgacggaacaagtggaagaaccacatggagtataacgtatctaatgccgaccgtctgggcgaatgtacccgggcagtcggcttgttttgaatcagggtgctttttatcgaaaaagcacccgggattctcacctctgagacaaaagatgctttggctcaaaaagcataaaatacccactgagagtaagacaagacaaacacgcctggcaacaaaacttgatattgacagggaaaagcacgctatgctatagtcataaaggttagctgcaactaaccaatatcatgttttggcaatgctgcctgcgggcagggaacataatcacattacaaagtaagcaggaggaagaatcatgcagaatgaatggagaggctttcagcggggaagctgggaggaagagatcaatgtcagagattttatccagaaaaactatacgccttacgacggggacgacagctttctggaaggaccgacgcaggatacgacagatttatggaacgaagtgttagaactgtcgaagcaggagcgtgaggcaggcggtgtcctcgatatggataccaagattatctccacgatcacatcccacggaccgggctatctggacaagagcaaggagaagattgtcggctttcagacagataagccgttcaagcgttccctgcagccgtacggcggaatccgcatggcagtgaaagcctgcgaggataacggctaccatgtagatccggaagtggtggaatattttaccacgcacagaaagacacacaacgccggtgtatttgatgcttacacaccggagatgcgcgcatgccgttcggcacacatcatcacgggacttccggatgcatatggccgcggacgtattatcggcgattacagaagaccggcactctacggtgtggatcgcctgatcgaggacaaggaagaacagctcgcaacgacccgtacgatcatgtactcggatgtcatccgtgagcgtgaggagctttccgagcagatccgcgcactcaagatgctgaaagagcttgcaaagatttacggctgtgacatttccaagccggcgaacaacgtgctggaagcgacgcaggcggtatatttttcctaccttgcagcagtcaaggagcagaatggtgcggcaatgagccttggacgtacctccacattcctcgacatctatgcggagcgcgatctcaaggaaggaacgttcacagagaaggagatccaggagatcatcgaccagtttgtcatgaagctgcgctgcgtgaagtttgcacgtacgccggagtacaactccatcttcgctggggatccgacctgggtgacggagtcgatcggcggaatcggtgtggacggcagacatatggtgacgaagatgtcctaccgctacttaaatacactcaacaacatcggagcagcgccggagccgaatatgaccgtgctctggtcggtacagcttccagagaactttaagcgtttctgcgcacagacatccatcaagcactctgcgatccagtacgagaatgatgacatcatgcgcgtggtacacggggatgactacggaattgcatgctgtgtatcctctatgcgcatcggcaaggagatgcagttctttggcgcccgcgctaaccttgcaaagtgccttctgtacgcgatcaacggcggtgtagatgagatcagcggcaagcaggtcggaccgaagtaccgcccgatcacttccgagtacctggattacgacgaggtgtgggataagtataaggatatgatgaagtggctggcaggtgtttatgtcaatgccttaaacatcattcattatatgcatgacaaatactgctacgagaagctggagatggcgcttcatgacaagaaggtgcgccgctggttcgcgaccggaatcgctggtttttccgttgtggcggattccctgtctgccatcaagtacgcaaaggtaaagccgatccgcgatgagaacggaatcaccgtagactttgaggtggagggcgacttcccgaaatacggaaatgatgacgaccgcgtcgacgacattgcaaaggaagtgcttcacacattcatcggctatgtcaagggcaaccacacctaccgcggcggaatcccgacgacatcgatcctcacgatcacatccaacgtatcctacggcaagaacacaggtgcgacaccggatggcagaaagaagggcgttgcctttgcaccgggcgcaaacccgatgcacggacgcgacacgaacggtgcggtagcatctctcgcgtcggtagcgaaaatgccgtttatggattcccaggatggtatctccaacacgtttaccatcgtgccggatgcactcggcaaggatgagacgggcgaggagcagaaccttgtggcgctgctggatgcttacgtcgagaagggcggacatcacttgaacgtcaacgtattgaaccgcgagacgcttttggatgcacagaaacacccggagcagtatccgcagctcacaatccgtgtttccggatatgcggtaaactttatcaagctgaccaaagagcagcaggacgaagtcattgcaagaaccttccacgagcgcatgtagttcatgtggaagtgatacagacaggataaatcgcgcgaaccggaaccggtgccctgctgcttttgcggcagggacaccgggatacgccggctcgcgcgattgtattatgattatcagatggatgggattaaaaaggaggactttatgggaaaaattcattcgatggaaagctttggaacggtggatggaccgggagtccgctttgtggtgttctttgagggatgtcccatgcgctgcctgtactgccataatcccgacacctggcatctggaggatgggcaggagatgagcgcggaagagattctgtcacgcatggagcgcaaccggtcgttttaccggaccggcggaatcactgcgaccggcggagagccgatgctccagattgattttttgacggagctctttgcaggggcaaaggaacgcgggatttatacctgtctggacacgtcgggcattatgtttcccgggtgtggcggcacgtcggaggaggagcgggaacgcttaaagaaggtggatctgctgctctcggtgacggatcttgtgatgcttgacatcaaacacatggatgcggaggagcaccggaagctgaccggacaggacaatgagaagatacttgcgtttgcaaggtatctggatgaaaaacagataccggtctggatccggcatgtggtcgttccggggattacatttcagagggaagaactggaggctctgggccggtttcttgcaacactctcaaatgtggaaaagctggaggtacttccgtatcactccatgggaaaagtgaaatatgacaatctcggcattgattatgcattaaaagatacgccacagctcaccaaggcggaggcgaaaagtgcggagagcatcattctggaggcaatgcgtcaggcgaggaatgtctgactgccggaacggatcgtgcagggaatgatagagaaagtgcatgaagtaaacgatgccgcgtccaatatggcagctatcacggaagaacagtctgcatctgcggaggagatagaggcaacggcggtcagcattcagaaactggcggagattgtctctgagaacagtgcagatgtgcagaaagactcgaaggagatggaaaacacggctgagacgctgaaggaacatatttccaggtttacgatttagaacttgcagaagaggtactttcgtattatagtgtagatagagactcagataataagaaaggagcatgcattatgaagatcaagaacatcacggatatcgacggatttttcaaggtaatagactcctgccagggaaaagtggaactcattaccggtgagggggacagactgaacctcaagtcaaagctttgccagtatgtatcacttaccagtattttaaagacggatgtggagattccggagcttgagcttgtcgcttacgagccggaagatacagagaaaattattaagttcttgatgaagggctgagagaaagaaccgtcaacacaggttggcggttcttttttgccttttaaaaatttagaattgaggtatttatgaaaccagaagaaacagtatttcacgagataacactgcaggataaggcatggatggatcagaagttcgcggaggatgaccggaatgcctgcgaatactcgtttgcaaataattttatgtggagaaatgtctatcaggtcagagtggcggagcttcacggctgcctggtagttcggtttatagatggagagattcactgcttttcatttccggtcggaaacggcgacaaaaaagcggcggtggaggagctgcttgcgatctgccatgaggagggaatccagctgttgatagcgcctgccagcgagcaggaccgcgcgcagatgctcgagtggttcccgggaagattcttaatcgagggagaccggaacgactatgactatatctatacaagagagaagcttgcgacgcttgccggcaagaaactgcacggaaagcgcaatcacattgcccgctttaaagattcgggagactggtcttatgagccgatgaccgctgagaatgtagaagaatgccgcacgatgacgtatacgtggattcacatgcgcgaggaaaagtggaatgaggagatgaaccaggagatctcggtactccatgaggcgttcgaccatatgcaggagcttggacttgtcggcggagtgctccggagagacgggcagatcgtcgcgttttcaatcggggagcggctgaattcggagacgtttgttgtgcattttgaaaaggcgtatccggatcttcagggagcgtatccgatgatcaaccagcagtttgtcctgcatgaatgtgaggggtatgcgtatgtcaaccgcgaggaggacaccggcgatcccggacttagaaaggcaaagctttcctattatccggatattctccttccaaaatacgaactggaggagagcagggtggtctatgcggaccccgagcgggatgcaccgtatattcaggaaatctggcagaaatgttttggcgacgaggaagattatattcagttttatctgaagcaccgcatgacgagagagaacatgcttgtgattttccgggatggaagaccggtatcgatggcaagttttctgccggtgcagtacctgtgcagcggggcgtatgtggacgcgcgctatgtgtatgcggttgcgacactgccggaataccggggacagaagcttgcggaacagattctgcgttttgcggaagaaaaatatcaggtgccgctcattctgtcgccggcggaggaatcgctgacccgttactatgagaagctgggatttaagaatgcgtttcagggagaacacaaaaatgtgagcggcagtgacattacggcgctcgaggtaaaggacacggagccggttgcatgcatggagcctgtcacaccggaggagtatgtacggatccgggatgaaaagtgcgcgaaggaagggtatgtacactgggatgtggatgcggtttcctatgcgatggaactcgcggcaagctgcggcggcggtacggcggcagtcagctgtgaggataaaaacacacggaatgagcaggaagatgacagggatattctgatgtatgatatccggaaaaaagagctcgtgatactggagacaacgctgtcggacgacgctctctcacaggtgcttccgcagcttatggaagagacgggaaccagcgcagcatcgtacggacgggagcggggcatgatctggctgccggagacgatggcagatctgccggttgcgggcgacggttatctcgcactgacgcttggttgatgaattttcagaaaaaattatgaaaaatgcataaattttcttgctataaagccaaaatatgttataatataaccatgatatatcttgtatcaaataaacggcaaaggggttggacatcatgagaattaagattacaggaagaaacatcgaattaacagaggggctgaaggcagcagtagaggacaagctgaacaagcttgagaagtattttacaccggataccgatgtatatgtgacgctgagcgtggagaaggagagacagaaagccgaggttacaatcccggcaaaaggaaattatatccgctccgaacaggtaagcaacgatatgtatgtatccattgatcttgtggaggaagtgattgagcgtcagcttaagaaatacagaaccaagctggtgacaaagcagcagaatgcatccgctgtatttaagcaggaattcctggatggagccgcagacgaggatgaggagatcaagatcatccgtaccaagaagttctccatgaagccgatgtatccggaagatgcatgcgtgcagatggaactgctgggacacgacttcttcgtattcatcaatgcagagacggaagatgtcaatgtggtatataagagaaaaggcaacacctacggactgatcgagccggagaattaagagcgtttgagatgtgctgtctcataatgaactgatatatttacagaaagaagagggagaaccgtattgcagatgcggcactccctcttctttttgtggagaaaaaaggagtttgagctgacagagggcgctttctgtaaaattttttgtgcaaaggggtgtacagttagtactaaagtatcttataattgtagttaagcgcgccctgcgtgtgcgagaggtagaaaagttaatcatgtgtgaaacaaaagaaaagggctcaagtaggaaaagctacggacatacaaatgtattggtggatatgatgcagaattatccggggtttatggattatattgcatatcagtacccattggagggagaacggattgaattattggaacagattctgaccgcgcttgcggtgggaagaaagctggaagcggagcagatgatttatcattatggcagtatgattcacgggagggatctcattgcgaggcaggtttttctgtggcttttggggatggcagaatacagcagacgtgagtgtatagcggaagagcgtagataaaaagcaggaaaggggtcgcagcgcaggggcagagctttgaaaaaacaaggaatattcttgtcatcagatcgaaaaaggtatactataaagcgagaaaagttttgaaaaaggagagacggataccatgaagatagttgttttggcaggggggctcagcacagagagagatgtgtccttcaagacaggagagatggttacgaaagcactcagagagaacggacatcaggtaattttacttgatgtttttatgggatatagcgataaggaagaagatcttaccggaatttttgacagagccgaggcggtcagcgtcaaggtggcggcgattccggagaccgcgccggacctggaaaaagtaaaggcgcagagaaaggatcagtcggataatttcttcggaccgaatgtcatcgagctttgccggatggcggacatcgtgtttatggcgcttcatggagagaacggagagaacggtaagatccaggcggcgtttgacctgtttggcatccgctacacaggaaccggatatctgggcagtgcgcttgccatgaacaaaggaatggcaaagcagctgttcctcgagaatggaatcccgacgccgagaggcacgtccttaaagcgtggcgaggatgcggcaaagatcgagacctgtggaattcatttcccgtgcgtggtaaagccgtgcagcggcggatcaagcatcggcgtatcgatcgtgcacgacaaggcagaatacgagcaggcattaaaggaggcgttccgctgggagaatgagctggtcattgaggaatatgtaaaaggaagagaattttctgtcggcgtcatcgattttcaggcgcttccgatcatcgagatcgcgccggtggaaggcttctatgattataagaacaaatacaaagcaggaagtacggtagagacctgcccggcggagctgtccgaacagattacaaaggaaatgcagggctatgcagagaaggtggcagaggtgcttggactcaatacgtactcgcgcacagacttccttctggatgaggaaggccgcattttctgtctggaggcgaacacacttccgggcatgacgccgaccagtctgctgccgcaggaggcaaaggtgaccggcgtggatttcaaccagctctgcgagaagctgatcgagagttccatgcgcaagtacaagaattaagaatgaagtttgaaatgggagccattatgaaaaatatgacattggagcatatcgcgcaggcgtgcggcggtacatacatcggggaagagtgcgaccgcgaaaaggagattcagggggcggtaattgacagccgtctggtcgaggagggatatctgtttattcccatccgcggagcgcgcgtcgacggacatgatttcattccggcggtttttgaaaagggagcgcttgccgtgctctccgagcagcggctcgagcatccggcaggaccgtatattctggttgactctacggaggaagccatgaagaagatcgcggcgttctaccgccgctcactcgacatcaaagtcgtggggatcaccggaagtgtcggaaagaccagcacaaaagagatgatcgcgtcggtgctctccgagaaatactgcgtgttaaagaccgaggggaatctgaacaatgagatcgggcttccgctgacgatctttaagatccgggaggaacatcaggtggcggtgctcgagatgggaatctccgagttcggtgagatgcaccgtcttgcagagatggcacagccggatatctgcgtcattaccaatatcggcttatgtcatctggagaacctcatcacaagagacggcattttaaaggcgaagacggagagttttgagcatctggcaccggacgggatcgccgtattaaacggggatgacgataagctctgtgacaaaaagatggtgaatggcagaccggcggtgttctatggaatcggacaggaagcaaagacggcagagacagagaccggcagcaaacggctcgcggaaaaggaagtgtacgcgaccgatgtggaggcgatcggccttgagggaacgaaggcggtcattcacacgccggagcagcagtttgaggtggtgatcccgattgctggtgagcacaatgtatacaacgcgcttgcagcagtctgcgtggcaagacggctgggacttgatgcggaggagatgaagcttggaattgagcatgcgcacacgattggcgggcggagtaatctgatccggaagaacggcatcacaattatcgacgactgctacaatgcgaatccggtgtccatgacggcttccatagacgtgctgtcccaggcgaagggacgaaagattgccgtgctcggcgatatgggagaactcggcagtgaggaaaagaagctgcacggaatggtcggcacacactttgcggggaagaagatcgatgcgctgtttgtgaccggaacacttgcaggggagattgcggaggaggcgcggcgtgtagcgccggagactagggtctatgcggaaccggacaaagaggcgctggaggaggcgctgctggagtaccgcagaccgggggataccattctggtaaaggcgtcccattttatgggattttcggagattgtgaaaaaattggaacagccacagtgaataaggaaggtacacatgaaaaagaatatcatactgattggaatgcccggcgtcggaaagagtaccgttggcgtggttcttgcaaaagtgatgggataccagttcattgatgccgatctggtgatacaggaaaaggaaggaaagcttctgcgtgagattatcgctgaagtcggaccggagggattccttaaggtggagaaccgcatcaacagcgggatcgaggcggaacatgccattattgcaaccggcgggagcgtggtgtacggagcggaagcgatggaacatcttggccggatcggtacggtggtttatctgaaacttccgtaccgggaattggagcgcaggctctcggacatcaagggaagaggggttgtcttaagagacggacagacacttcatgatctctatgaggaacgtgtgcctttgtacgagaaatatgcggatgtgattgtggatgaacatcatttgaacgtggaacagacgattgagaaaattatggaattgaaggaacgctttcaatgaagaaacaaacgtttacaaaacaggcagtctggcaggcagctgcggtaggagtcctggcggtcggcggagtccttttttgcctttccgggcagattggaatcggacagacataccggcaggtgcgcgtggatgaccgcatcatcgggtatgcgccggagaacactgatatggatgacatcgtccgtcaggcgagacaggaactgacgcaaaagaccggggagagaatcagcggcgaagtcgtatggagcagtgaggagtgtagaaaaccgttccagaagttgttgtcggagaatgaattaaaagaagccgtagagaacatactaagtgagaaaaatgcagaggaaaagcagcgcgtctatacagtggcgatcgatgaataccgcgccaactttgcgacgatggacgaggtggagtcttttctggaaaaagtgaaggcttctgcggatgaggcggatgaatacggggcggtcattgcggatcagggctcccatgtgagcggaattctgacagcgtctcttgccagaagggacgcaggggctgcagcggatgaaaaagcgccggaggagacacaggttcctctgccgcaggcaggaatcagcgcctatgtgatctgtacgctggaggaggcatttgcagatccaaaagccacgtatgagacaggcatccttgatatggaatttgtggagcgggtgaatgtgttcgagaactatgtcgatgccgatcagattgcagatgtggatgaacaggttgccgaagtaacaaaagagaaagaatcgaataaaatatatgtagtggagagcggagactgtctctccgtgattgcgatggatcatgatacgacagtgtcgtcgatcgtggcgttaaacgggctggacagcgcggatgcgatgataagggacggtcaggaactcatcattgcggtgccggagccggatctgcagcttcgggtaacaaaaggagaggtctatgaggaggactacatggaagagccgatcatcatagacaacgattcctggtatacgacaaaagaggttgtacagcaggagggaacgacgggacaccgggagcgcaatgacgttgtggtctatgagaacggtgtggaaacaagccgcgagatgatacatcagaacgttatggtggcgtcacaggcggcagtcattgagcgcggtaccatcattccgccgacctatatcaaaccgatttccggaggaagatatacgtcaggattcggcagacgctggggacgtatgcacaagggcgttgactgggcatgcccgatcgggacgacggtgtacgcatcctgtgccggaacggtaatctctgcgtcctataatggcggctacggcaataacgtggtcatcagccatgcggatggcagactgacgagatatgcacacaacagtaagcttctggtgaaggctggacagcatgttgagcagggagagccgatcgcgttaagtggaagtacgggacgttctacaggaccgcatgttcattttgagatctatatcaacggttcagcagtggatccgctcaaatacatcagcaactgatgggaagaggacacagactggaaatagttgtatgctgtacaaatggatgaaatttatggtataatgtacactatatggttgatgaacgaagaacttaagaattacttgacaaaatcatgtaagcgctagtataattacgtgtttgtataaagcgttcatagaggtgtgatatggaacagtatgtgatcaaaggtggaaatccgctggtaggagaggtggaaatcggaggcgctaagaatgcggcgcttgcgatcttatctgctgcagttatgacggatgagaccgttacaatagaaaatgtacctaatgtcagggataccaacgttttactcaatgccatcgaggagattggagcgcgggtagagcggctggatgctcacacggtaaggatcaatggatcttttatccgggattttaatgttgacaatgaatttatccgaaaaatacgtgcatcttattatctgatcggcgcactgctcggcaaatataagcgggcggaagtggcgcttccgggcggatgcaacatcggcggacggccgatcgatctgcacatgaagggctttagggctctgggcgcagaggtggatatcaagtatggtctggtgcgggcttatgcagaaaagttaaccggcacccacatttatctggataaggtgtctgtcggggcaaccatcaatattatgatggcggcgtccatggcagagggcaagacaattatcgagaatgcggcgaaggagccgcatgtggttgacgttgctaacttcctgaacagcatgggagccaatatccgcggtgccggtacggacgtgatccggattgtcggagtggagaagctgcatgcgacagagtattcgattattccggatcagatcgaggcaggtacctttatgctggcggcagcggcgaccaagggcgacgttaccgtaaaaaatgtgattccgaagcatctggaagcgatcagcgcaaagctgcttgagatcgggtgcgaggtggaggagttcgatgacgctgtgcgcgtggtggcatcgaagccgctgcgtcatacacaggtgacgacgcttccttacccgggcttcccgacggatatgcagccgcagatgacggttgtgctgggagtggcccagggaacgagtaccgtgacggagagcattttcgagaaccgttttaagtatgtggatgaattgacacgcatgggtgcaagcatcaaggtggagagcaacatcgctattatcagcggtgtggaccagtacaccggtgccagagtcaatgcgccggatttaagagccggagcggcgcttgtgattgccggacttggcgcagagggcattactgttgtggacgatatttattacattgagcgcggctacgaggcatttgatcagaagctgtcactgcttggggcattgattgagaaagtttccgacgaaaaagaaatacagaagtttacactgaaagtatcatagaatggaagttttgaaccatcaggtctgctgcgggaggggatcccgcagcagacattttttatttcataggaaatactgcggaacgttaatacaagaaagcagaaccttcctatgaaataaaaaaacgttcttttgacatgatagcgcggaagacagacttggaggataacaatggaagcacaggaaatacaacagaaagagttacatactatgagaggagaactggcactgcttgttgcagtgctgattaacagcttcggggtggtgctgatgctgcactccggcgcgggaatctctgccatctcgagcgtgccgttcgcgttttcggaagtgtttacgcggatctcgctcggcacatggacatacctgttccagggcgtcctggtgcttagcctgatgattttaagaaaaaggtttgtgccgcagtatctgttcagctttgtggtgggatttgtgttcggggaacttttggatgtgcatgaggcgtggatcaatcttctgccgcttacgcttccgaaccggattctctattttgcaatcagctatctgttgatctgcatcggaattgcactgtcgaaccgctgcggcctgccgatcataccgacagatctgttcccgagggaactggcggacattacgggtgccgcgtattccaacataaaggtctcgtttgatgtgatctgcctggcggtgaccgccggcatgacgatcttcttcctgggacatctggatggacttggaatcggaacgattctggcagcgtttacgatgggaaaggtgatcggggcgatcgggaaatggatggacgggcgtttgcggttcgtgtcggttctgactcctaaaacggcaaagccgtgttagaaagccctggcaaccgggaaagcgtacaggagataagctgtatggtgagaagttagagaaacgtaatgttccggaaggcagccaacagcgacgattctgatcgtaaaatccggtatttctaaccatgccggacgcggcacggaagaattacctggattttactccaaagaattcgccgctgctggctgtcttccggaacattgagtgtctgaaatcttttgcatacagcttatctcctgcatgttctttcatttgccggggactttcggacacggctttgccggtttagagaaccgcctgaatatgcagatcgcccgcagttgacagatcaatacaggaaccgtcgtctaactgcacgatcggtctggaaagctgcttgtcgttgagcatgacaatgttggcgctacgaccgtcacttaagaggatgcggtggttctggtaggtgccggcgatccggttgaggaacgcgagaacacatttggtatcgtatttctgcagaccgtcacgctcaaagttggcgataacctgaaaagcgcacaggggagcacggtaagagcgggcggtcgtcatggcatcataaacatccgcgatcgcaacaacgcgtgcataaggatcaatatcgttcgtcgtaagaccgcttggatagccggtgccgtcacagcgctcatgatgagagagtgcggcgagcttgatgtgtgcatccagcggaagcggctttaacagttcgtaaccgtactgggtgtgcagcctgacctgcgcgaactcttcgtcggtgtatttgcccggtttgttgagaagctctgttggaatcttgagcttgccgatgtcgtgaagcagtccggcgagcgtcagcatgtctaaagtggcgtcgtctgccttgatccattttccgatctgccgacagatcagcgagacattcagggaatgtacatagacgctgtcgtctgaggaatgcatgttatgtaacatattaaacaattccagagaagtcttgcaggactggaacaattcgacgaccttcgacaggagcgctgatgtgtctaacggcttgccctcgttcacgtagccctcaaagctgacacggatctgactgagcacgatcgtgtgatccacctggaaagactgaaacttctgcgaagtcttgattttctgcgaataggacttgggagccgcctgcttttcttccccgtccacaatgcaggccgacttgatattataaaaggaaaggcgcaggatcgactgcttcgtaagttcttttcctttttcaagaaccacctgtccgctgggggtagtgatgtcttttgcaagaaccatgccctcttttaaattgtacagtgccaattctttcatttgcttaccccttctacctatatttactacaactactttcagtatagaagtttgaaaaaagaaagtcaataaaaagcttgacatagcggagaaaggggtgtaatgtatcagacgtagatttgaaaattcaatattgtgtgtaaattttcttattcagagtgatggagatacataggatctgtgaagtcacggcaacccctctacggaaggtgccaacctgagcgagcaaatactgttatggatgagcgctgtcagaagcgatatccgcgatagttcgaacaataagaggatttgattatctatacgtcacttccacttgtttttcgcaagtggtttttttgtgtcattttacatgatgagaaagggagtaataaggaatggaaaagagattatttacatctgagtccgtcacagaaggacacccggacaaagtctgcgatgcaatttccgacgcgattctggatgcgtgcatggcagaggatccgatgagccgtgtggcttgtgagacggcaagctgtaccggatttgtgctggtaaccggagagattaccacaaaggcaaagctggatattccggcgatcgtgagacagacagtcaacgagatcggttacaacgatgcgaagaccggatttgacggaaatacatgtgcagttatggtagcgctcgatcagcagtcaccggatattgccatgggtgtagacaaggcactcgaggcaaaagagggcgggttaaaggatgagctggataccggtgcaggagatcagggtatgatgttcggttatgcgacaaacgagacaccggagcttatgccgtatccgatttccctcgcacacaagctggcattacagctgaccagggtgcgcaaggacggcacactttcctatctgagaccggacggaaaaacacaggtttccgttgagtatgatgagaatggaaagccgcttcgtctggaagctgtcgtactgtccacacagcatgatgatgatgttacacaggagcagatccatgaggatatcaagaaatacgtgtttgatccgatcctgccgaaggaactggtagatgcacagacaaagttcttcatcaacccgaccggacgttttgttatcggcggaccgcacggagatgcaggtctgactggacgtaagattatcgtagacacctacggcggatatgcacgtcacggcggcggcgctttttccggtaaggactgcaccaaggtagaccgctccgcggcttacgcggcacgttatgtggcaaagaacattgttgctgcaggtcttgcagaaaaatgcgagattcagctttcttatgcgatcggtgttgcccagccgacatcggttatggtagacaccttcggaaccggaaagctttctgacgagaaactggtggaaatcattcgtgaaaacttcgatctccgtccggcaggaatcatcaagatgctggatttaagaagaccgatttaccgtcagacagcggcatacggacattttggacgcgccgatctgaaccttccgtgggaggcagtcgataaggtggagacattaaagaaatatttgtagagttttatgaaaagtttagacaattttacataaaataaataggtttttggatgtttcgtgttataatgggtcatagaattacagttctatgacccgtttttttgcgggaatttgcggggtggacaaagcaggcatgaagttcaaaaataaaattatcatttcattttgtattatcatatttatccccattcttcttgcggtggcggtgcttttcggattccagaagatccagctgaagtcgattgaacagacatacggcgtggagagtgacgattacagttatttttctaattccatgcagctgctcagccgttttacgcgcgagtcctttgagacgcttctggatctttcaaagcaggatccggataagctggaggataaggcgtttctggagcagatgaatgacactctgcgcgagaagtattcgtatcttgtcgtgcgcaggggagacgagctgatctatgtgggagatgataaggaggcgtcgctgctgacggatctgccggcctacggaggggaagagtccggggcagacaccggcatctatgtcgacggagacaagcaggcgctgatcaagcagattgattttgtgtatacggacggaagccagggaagcgtttttattatcacgatccttgaggagaccgtgccggagttgaagagcctgatggcggatgtggggatctcgattatcctgatcttaatcctgacagcatgtatgctgaccgtatggatttatacaagttttatcaacccgatcaagaagctgcaggtggcggcgcagaacattaaggacggtaatctggattttacggtggatgtagagacgaatgacgagatcggggagctctgccgcaatttcgaggagatgcggcagcggctgaaggataacgcagaggaaaagctttccggtgagcgtgagaacaaggcgctgatcagtaatatcgcccatgatttaaagacgccgatcacagccgtgaaggggtatgcggagggtctcatcgacggtgtggcggatacgccggaaaagcgtgacaagtacatccggacgatttataataaggcgaatgagatggatacgctcatcaatgagctgaccttgtatgcgaagatcgataccaaccgcattccgtacaattttgcaaagctgaatgtggcggagtatttcaatgactgcattgaggagatcggactcgatctcgaggcgaaaaacatcggactggcatattttaattatgcggacgaggatgtccagattattgcagacccggagcagctaaagcgcgtggttaacaatatcgtggggaattcggtcaaatatctcgataagcagaagggatttatcaatatccggatcaaggatgtcggtgattttatccaggtcgagattgaggataacggcagaggaattgccgcgcgcgatctgccttacatttttgaccggttttaccgtgcggatgcgtcgcgcaattctgcgacgggaggcagcggtatcggattatcgattgtgaagaagattattgaagaccacggcggtaagatctgggcgacaagcaaggagtccatcggaaccgtgatgtattttgtattacgaaaatatcaggaggtgccatatgagcagagtattgatcattgaggatgaggtggagattgcagaccttgagaaggattatctggaactcagcggatttgaggtggagatagagaatgacggaaccgtcggactgaaacgggcgttgacggaagattttgatatgtacatcctggatctgatgctcccgggcattgacggttttgagatctgcaagcagatccgggaggagaaaaacacgccgattctgatggtgtcggcgaagaaggatgacatcgataaaatccgcggcctgggactgggagcggatgactatattaccaagccattttcgccgagcgagctggtggcgcgcgtgaaggcacatctggcgcgctatgagcggctgatcggcagcaatacgcctgagaatgatacggtcgagatccgtggaatccgcatcgataagacggcgaggcgtgtctgggtcaacggcgaggagaagcagttcacgacaaaggagtttgacctcctgacatttcttgcggagaatccgaatcatgtatttacgaaggaagaactgttccgccagatctgggatatggaatccatcggggacattgcgacggtgacggtacacatcaaaaagatccgcgaaaagatcgagatgaacaccaacaaaccgcagtacatagaaacaatctggggagtagggtacagatttaagctgtagagcttaaatcgtaaggatgtgtaaaggtgtgcaaggcaggcgctccacagcgaagctgtaccggaatgagcgcctgcgctgcgaagcagcaacaatctggggagtagggtaccggtttaagctgtaatttataatttggaaggagtgcaggaaaatgaaaaagtatgtaaaaccagaagttgtggagacaaaagagtatgcggagggcgtgtatctggcgagcggtggttcgacagataattcgtcgggaccggaagaagctgtctgtcgatttggcagaaaggaagcaaacgcgggttcggacacctgtcaggagtgctctaagagcggcgggcagagaaatacgccgcttccgggcgaggagtctgcgcgcgaagcagattttaccggatgtatcgacggcagaccggtaaagagatcataggcagcaggatgacagagcgggcgaaggagagcacagatgagtgggaaaaaaattgcaatcatatacaaaagtctgacagggaataccagacaggtggcagaagcaatacgggatgcgcttggcggtgaagagattgtatacttcggtgagccgaagccggacattgtggcggatctttattttgtaggatcctggacggacaagggaagctgtgatggaacggttggtgagtatttgaagcagctggaaggaaaaaaactggcggttttcggcactgccggttatggtggttccagagaatactatcagaagctggcgtgccgggtaacggagtgcgttccggataccagtgaggtgctcggaagcttttactgccaggggaaaatgccgatcggagtgagaaaccgctatgtggcgatgctgcgggagcacccggaagatcagaagctgaatgcgagcgtaaaaaattttgacgaggcgctttcacatccggatgagaaagattttgcggatgcacgccagtgggcacagactatggtggatgcggtttagaatatggagatcagaattttatttgaagacgagcagattattgtctgcgaaaagccggcaggtgtggcggtacagacgaaaaggctcggacaggcggatatggagagcctgcttaaaaacaggcgggcggggaagggcgaactgccgtatatcggagtggtgcaccggctggatcagccggtatccggagtgatggtgtttgcaaagacgaaggaggcggcagccgcacttagccggcagattgcgtcggggctggcggacaagttttactatgccgtgacagacggggtgccggaagccggaaaggggcagtttacagattatcttctgcgtgacggcagaaccaatacgtctgcggttgtagaaagcagtacgccgggagcaaagagggcagagctttcctacgaggttttagagcagaaaaacgggcgcgccgttcttcggattcagctgggaaccggcagacatcatcagatccgcgtgcagctggcacatgcagggatgccgattgtgggagaccggaagtacaattttaaagagaatatgaagccgtcgggggaaccgctctgcctctgttcgtacaaaatcgggttcagacacccgaaaacacgcagaaatcttgcgtttgaaattgacaaccctttccatttatcataaaatcattagttgtgcaggagctgcacacagacaaccttgaagctgcttgcaacggcagtaagagctatgaaaaggagatagatgatggcaaaggacaacaagaaattagtagaagcgatcacatcgatggatgttgatttcgcacaatggtacacggacgtggtaaaaaaggcggagctgatcgattattccgcggtaaagggatgtatgatcatccgtccggcaggctatgcgatctgggagaatatccagaaagagcttgaccgcagattcaaagagaccggcgtggagaatgtatacatgccgctttttattccggagagtctgctcgaaaaagaaaaggatcacgtggagggatttgcaccggaggttgcatgggtaacctacggcggattgaacccgctgccggagcgtctctgcgtcagacctacatctgagacactgttctgcgatttttataaaaatattattcactcctaccgtgacctcccgaaggtatacaaccagtggtgctcggtggtacgctgggagaaggagacgagaccgttcctccgttccagggagtttctgtggcaggagggacacaccgcgcatgcgaccgcagaggaagccgagcagcgcacgattcagatgctgaatctgtacgcggacttctgcgaggaggtactggcaatgccggtcatccgcggacgcaagaccgagaaggagaagtttgcaggtgcggaggctacctatacgattgaggcgttgatgcatgacggaaaggcactgcagtccggtaccagccataacttcggcgacggattcgcaaaagcgttcggtgtccagtataccgataaagataataagcttcagtatgtacatcagacttcctggggtatgaccacacgtctcattggtgcgatcatcatggtacacggcgatgattcgggtctggttctgccgccgagaattgcaccggtacaggcgatggtgattccgatccagcagtacaaagacggcgttatggatgccgcaaagagtgtctgcgagcgccttggaaaagtatgccgcgcgaagctggatgactcggacaagagcccgggctggaagttctccgagcaggagatgcgcggaattccggttcgtatcgaacttggaccaaaagacatcgaggcaggcaagtgcgtagtagtgcgcagagacaccagagagaagattgaggtcgcactggaggatctggagcagaagattccggagattttagagaccatccagaaagagatgttcgagcgtgcaaaggcacaccgcgacgcgcatatctgggatgcccacaattatgaagaattaaaggacatcgcggcaaacaaaccgggatttatccgcggtatgtggtgcgaggatcaggcgtgcgaggacaagatcaaagaggagcttgccgtgacatcccgctgtatcccgttccatgatcaggagcagatttccggaacctgcgtatgctgcggcagaccggcacacaagctggtatactggggcaaggcatattaaggagaagtgcgtggataaaaatgcaaagatcagcctgcctgcgaaggtcgcgaggattctgaatacattaggtgggcacggatatgaagcgtatgcggtcggaggctgcgtgcgcgactccctgctcgggagaatgccgcaggactgggacattacgacctcggcgcgaccggagcaggtcaaggctcttttccggcacacgattgataccggaatccagcatgggacggtgacggtcatgctggatcatgagggattcgaggtcacaacctaccggattgacggagaatacgaggatgcgaggcacccgaaggaagtggcgtttaccgcgaatcttctggaggatctgaaacgccgcgattttacgatcaatgcgatggcctacaatgaagtgaccggactggtggatgcctttgacggaatcggcgatctggagagaggcgtgatccgttgcgtgggaaatgccatggagcgcttttcggaggacgcccttcgcatgctccgggcggttcgttttgcagcgcagcttggcttttcgattgaacgggagacacaggaagccattgccggactggcgggcaatataaaaaaggtcagtgcggaacggattcaggtcgaactggtaaagcttttgacttcgccgaatccgggagagctgaaagtggcgtatcgcacggggcttacggctgtttttctgccggagtttgacatgatgatggagacaccgcagaacaatccgcatcactgctacagtgtgggagagcatacgctaaaggcgattgaagcagtgccggcggataaggtgttaaggcttacgatgctgctgcatgacattgcaaagcctgcctgcaagacgacggacgaaaaaggcgtggatcatttttacggacatccggtgcgcggaagcgagatggcgcgtgggattctgcgccggctgaaatttgacaacgataccaccgaccgggtgtgccggctggtgcactggcacgacgataatccggagctttctgggaaggcggtccgcagggcgatgcacaggattggcgtggaacagtacccggcattgtttgcggtcaagcgcgcggatattctggcgcagagcgggtaccggcgcgcggaaaagctggcgtatgtggacgcatatgaacagatgtaccgggagtgcatggagaaaaaggagtgtcttacgatccggcaactggcggtttccggtcaggatctgattgcagccggaatgcagccgggaaagcagatcggggagatgctgaatgaactgctggaacgggtactggaagatcccgggctgaatacgaaggaacaattattaaaaattgtgacaggaaagatttctgatcaaaacaggtcatgaaataaaaacccctcacatatgatgaagagacacggcagagcagccgcagatcaatcatatggaggggtttttgtgtataatcgaccggagcaggtattggagcagtacgacctggaagtgagagcggtttccaaagggcgtgaaagttatatttgtgatacaacacaggggcagttacttttaaaagaatacaaaggctcggcggagcgggcagagtttctctctgccatactcgggcatctgggtggacagggactcttaacggagcaggtcgtgcggacgaaggaggacgccccgattgccgtcgcggaggatgagacaaagtatatggtattgacggctgtttccgggagcgagtgtgacaccagaaaccgggcggacatgatcgcgggggcggaaaaactggcaatgctgcacaacgcggcgggaacttattcggagacggttccagagtttgtctgcaacgacccgaatgaattgcaggaactgtatgagaaacataaccgggaactggtcaaagtccggaattacatacggtccaagaagaaaaagaatgattttgaagtgctcttttacgggcagtatgagcgctttatggaaaaagcaaggcaggtggcacaggaactttcggcgatgggacagggcgggcagagcgccgggttttgtcacggtgactataaccagcacaatattctgttttccaaaaacggaatcggcattgtccattttgagtgcttttcctatcagatacaggtcagcgatctggcgaattacatgcggaaaatgctggaaaaaaacaactggaacaccggacttggcatggatctcatctgtgcgtatgaccgtgtgcgccggctgactgccgtggaactgaactatctgtatctgtatatggcatatccggaaaaattctggaaaattgcgaaccgctattataacacacataaggcatgggtgtccggacgcaatattgaaaagctggaaaaattcatacggcaggaggatgagcgggaacgattcctggaaatgatgcgccatttcaccttgcagccgcccgcgtcctgagataaaagttccgctgagttgtttaatatgatataatgaatcttgacagattcatattagaagttccggtggaacttcggatgcgcagaaagcagcgcaaaaaagatgatataatcaatctggcggtacttttgccgtagaattgtgtacacgataaaggagcagatatacttgaagaagaaaatagttcgatggatcctgccagtctgcatgatgctgttactggctggatgcggaaaaagcagcaatacagttgtgacaggaacttactataatccgtcaaaggatgcggaaaatacagcacagaccgtcgggacggaggcggatgcgaacgatgtgctggatgcgatggaacaggggacggagcaggaaggcacgtcgatcggagcagacctgtttttaatcaccaacaatgatatgcaggcggagtgtctgattttaacacagttgaactccggcaagcagtatatgtataattacacgattgctacccggttccttgacaaatatggcagccggatgccggtgtctggatttgacgcgggtcgcattatccgtgtcggggaaaaagataagcagggcaggctggtggaagcgcagatctccgatctggcgtgggaatacccggatgtgaccagatacagtgtagatgaggagcacggtgcatttaagattgcggatacaaattattcgtatgatgaggatctgtttgtggtttcggacggaagtcccctccggctttcagatctgacggcactggatacgcttcgggtggtcggaattgacaagaaaatctattccatctcggtgaccaccgggcacggttcgttaaagctggtcaataccagtgtctttgatggaagttacattcaggtgggaagcaaggtgtttgcacagattaccggagagatgacgattgagattcctgagggaacatacacggcagctgtcgcgaataacggatacggcggaagtacggagattacgatcacgagaggtcaggagacggttctggatcttgagacgttaaagggcgagggaccgaagtacggaagcattctcttcgcagtcaatgttgagggcgcatggcttcaggtagacgggcagctggtggattacagccagccggtggaactacagtatggagtgcatacgctcaccgtgacggcggacggttatgatacatacagcaaaaagctgtttgtgaattcaccggaggcaacgatcgccatcggaatgacaggcgaatcaggaagctcgtcgactacgaccggaagtgagacgcagtcgtcggaggcagacagcagcacatccacaggagagagcgcagacggacaggcgggaagtcttgcgggaagtctggcaggaagccactcggacagcagttcctcgggttcatcttcaagttcgtcttctacatcgacgggaacagcggacacgacgagtgacgcggcactggatgctatcgtaaacgagattctggacaagaatggagacagttccagcagcagttccggcagtagcagcagtacttcggattatctttctacccttacgtctctgctcaatgcgcttaagggaaataattgagagaattatatcaatttatgacaggaatgggacttgaaaaagcaaaacaggaaagataagataggcttagaaaaaaagcaggaggaatctgagatgggatatagagaaacatatgagtcatggctgaacaatccatattttgacgaggcgaccagagcggagcttcaggcgatcgccgggaatgagaaggagatggaagagcgcttttacatggatctggagttcggtactgccggactgcgcggcgtgatcggagcgggaaccaaccgcatgaatatctacacggtgcgcaaagcgacacagggactggcgaattatatctgcaaagtgggagcacaggcaaaaggtgttgccatcgcgtatgattccagacatatgtccccggagttcgccgacgaggcggcgctttgtcttgcagcgaacggcattaaggcatatgtatttgaatcgttaagaccgacgccggagctttcctatgcggtgcgcaagcttgggtgtacagcgggcatcaacatcacggcaagccataatccgccggaatacaatggatacaaagtatactgggaggacggtgcgcagatcacacctccgcatgacacgggaattatggatgaagtgagaaacgtgacggattatgcttctgtgaagacgatgccgcttgaaaaggcaaaggcagatggtctgtatcagacgatcggcgcggatattgacgatccgtatattgcggagctgaaaaaactggtgcttcatcaggactgcattgacaaagttgcatccgagttaaagattgtatacacaccgcttcacggaaccggcaaccttccggtacgccgtgtgctcaaagagcttggattcacgaatgtctacgttgtgccggagcaggaactgccggacggcgatttcccgacggtaagctatccgaatccggaggcggcagaggcatttgcattaggacttgcactgggtaaaaaagtagatgccgacctgattcttgcgacagatccggacgcggatcgtctgggtgtttatgtgaaggatgcacagaccggagaataccacagcctgaccggaaatatgtccggatgcctgattggcgactatgtgatcggacagcgcaaggagctcttcggactgccggaggacggcgcatttatccgttcgatcgtatccacgaatatggcagatgcgattgcggcatactacggaatagatctgatcgaggtgctgaccggatttaagtttatcggacagaagatcttagagtttgaggagacaggaaagggcacatacctctttggtatggaggagagctatggctgcctgccgggaacttacgcgagagataaggatgccgttgcagcatcgatgatgctgtgcgaggcggcggcttactataagacgaagaacatgacactctgggatgcaatgcttgccatgtatgagcgttatggctactacaaggatgatgtgacttccatcacattaaagggaatcgaaggactggcgaagatccaggagattatgaatacgctccgtgaaaatgctccggcagagatcggtggatacaaagtgacggcggtgcgggattataagctggacaccatcacggatacggcagcgggtgcagtgcggccgacaggtctgccgaagtcgaatgttctttattacgagatgaccgacggggcatgggtgtgcgtcagaccgtccggaaccgaaccgaaagtcaaattttatctcggcgtaaaggggacatcgctcgcggatgcggacgcaaaatcagaagcgctctcaaaagcggttcgcgcattgatcgacaccatgatgtaaacgcttcccaaacgtaaaaaagctcggaaaatccccatattttggggatttttcttgacaaagaaagaaaaaacaagtataaatatgaagtaggtattttgagaacctcgaatattatttatattgaaaatccagaggaggaatttttaacatgaacaaagcagagttagttgcagcaatggctgagaagactgagttaagcaagaaggacgcagaggcagcattaaaggcatttacagatgttgttgctgaggaattaaagaagggcgagaagatccagttagtaggattcggtacatttgaggtatctgagagagcagagagaacaggaagaaatccgcagactggtaaagagatgacaatcgcagcttccaaggctccgaagttcaaggctggtaaggctttaaaggatatgatcaacgcctaagtgatatagagatagcagagtggattttgcggttgcagaatccacttttttgctttcagggaaaaggagcctttggaagcaggaacgctccgcaggcataaggagaagaagatgagactggataaatttttaaaagtgtcccggctgatcaagagacgcacagtggcgaatgaagcttgtgacgccggccgtgtgatggtcaacggcaaaccggcgaaggcttccgtgaatgtaaaagtcggcgacattattgagatcggttttggaacgaagaccgtgaaagttcgcgtgctggatctgcaggatacgacgaaaaaggaagaagccaaggatttgtttgaatatgtatcataatatgaaaaacctcccatatactttctaatagaaaaggaaagcgggaggtttttttatggaggaaaagaattataataatacggcaaaatcacataaggtcctgctggtaaaccggggaaacggcgcgttttccggtgttgtggatgtgctgtcttttgatgtggcggagattctgctcgagacggaactggggatgctgctcatcaagggacaggatctgcacgtgaaccgactgagcctggaaaaaggggaagtggatattgagggacggattgattccctgacctattcggatgtcaaaacggcgggaaaacaggcggaatctcttctgggaaggctgttccggtagatggcggtaagcacatcaatctatcaggaactgctgtttctcgggagctctgtgctggtaggaatgggacttttctttctctatgatatcctgcgcattttccgccggattcttccgcacggaaatatctggatcggcgtggaggattttctgtactggatcatttttacaggcgtggtctttgtccttttataccgggaaaatgacggcatggtgcgcgggtttgcgtttggcggtctgctggtcggaatggcgtgttattatctgctgctcagccgcctgatcgtgcactgtcaggtgtggatctggaaaaaaatactgggaattattggaaaagtgctgggatttttcgtgcgtccggtgtggaaaaccttaaaaaaagttggggcattttgtggaaaacgattgaaaaagtttgtgagagcggttaaaataggtttatgtaaactgtaagttgctacatagatgcaggaaatgagggacaggaatggcagcaaagaagagaaaatcaaatcggaataacagggtgggcaagatctgtatcagcatgattctggttgtatttgcagcggcaatgtctgtccagattgtaaaagcttatcagaaagatcaggagtacgccagaaagcaggaacagctggaggtgcagcttcaggatgagacggcaaggcaggaggaacttcagaattaccagtcctatacacagtcccaggagtatgtggaggatattgcgaagagcaaactgggactagcctatgacaatgagattatatttaaggaagaaccttaagaacatgagaatgacagaataaaaggagccttacccggagagatcatcccggataaggcttcttttttggctgttaaagtgtaatctgatcgatcgcgtcgagttcttctggcgtaaaggaagtatgtccgacaatggcgatattgtcgagaatctgttccgggcgggaagcaccaatcagcacgctggtcacgtcaccgtcctttaagatccagcttaatgccatctccgcgagcgtctgtccacgctttttggcaagctcattgagagcgcggatctgtgagagacgctccggcgtaagtgcggtctccttgaggaaacgtccgtcggtcgcgatgcggctgtcagccggaataccgtttaaatagcggtcggtgagcatgccctgtgccagcggtgaaaaggcgataatgcctctctgcagccttctggcagtatctttcaaaccgtttttctcgatcgtgcggtcaaagatggagtagcggttctggttgatgataaacgggcacttcaagtcgtttagaatcgcacatgcacgttccagtgtcggaccgtcatagttggacagaccgacatagagtgcctttccgcttttgacaatggaatcgagagcgcccatcgtctcttcgagcggtgtctcaggatccatgcggtgatgataaaaaatatccacataatccagccccaggcgctttaagctggcgtccaggcttgcgatgaggtacttgcggctgccccagttgccgtaaggtcccggccacatatcgtagccggctttggtgctgattagaagctcgtcccggtacgcagaaaagtcgtcccgcaggatttgtcccaggttgcgctctgcgctgccgtaagcgggaccgtaattgttcgcaagatcaaaatgcgtgataccgttatcaaaagcggtgcggcacattgccttcatgttgtcataatgtccggtgtccccaaaattgtgccagaaaccgagagaaaccattggaagctttaaaccgctggcgccgcagcgattgtactgcatggtatcatagcggctttcttttgccatataacccataagaaaatctcctttcatatcatggtggctatgcttttgcgtacattataacaccggcatgaaaaaatgtggtagaggaatatttctggatgaacttcctaaaaggcacgaagcgcttcaaagtccatgaaacagacaatggaaccgatattttggcgaaaagtttttcaaaaggggtccttcctttgacaaagattttccgggaacaaccctataatcgatgtcacccgcgaaaaacaccgggacagaccggaggcgggaatggaggtaggcgatgaaaaaaatgaatgcaagacaaatgatgctctgtatggcgggaagtgtaatgtgcagtgtgggcgtgatggggtgttaccctctggtgccggcgtattttgcggcgctgtatctggagcgggtcagcgggccggtgctgctcggtatgatgtacataggaatgtttgtgtttatgccgacggcggcagcagtaaagtatgcggtggcgcttgtcgtggtgatgggagcaatccggctcgtggaatgggccaacgagggatgcccctcctatatggcgggcagtatggcagcaattattaccatgatcctgtcggtggcggggggacttcttgaatggaaggatcagcccggaattctggcggcggcgctggagggcgcgtttatattgggagccgtgattctttttaaccgtgccctgcatatgatattacactggggaagaaaggcgggggtgccagagcggccggatggaggaagagaggagcggctgctggggtatgcggaatcgtttcagggcttgtcccaggtttttcacagtatgagtgccgcacatcagaacggtgcggcggaggaactgggacagatacagaacgagctgactggaaagatctgcgcgtcgtgtgacgcgtgtgcagtctgctgggagagagatcctgcacccttatacggcgcgctgtcggggatcctttccgcgatctggaacggagagactcccggggaggagaaaaagcaggagcttgcacagtattgcaggcacagcagtgatatggtggaggaggcggtgcgcgtctttgagcgtgtcagcttaaaccgggcatggtaccagagactggtggagaatcgggaggtgatagcggaacagctggatgcgatggcgtatatcatgcaggactgcgccagggaggagaaaattctggatgtgggggaacgccatgttctctcagaaattcagtaccgtgcgaaggagcaggggattgtggtggaggaattgcacctgatcgaggcggtggacggcaggatccggatcgatgcagtgttaaaaagccggctgggaggctgtgtcgcggtgaagacatttctggcgctctccggcgccgtgcttggaaaaaagctccggacaaccgcggatgcgcggacgtttattgcaaaggagccgttccggttcctgatctacgaggacaccgcataccggagcgtgcagggaattgcgcgggtgaagaaggatgaggcaaaaatttcaggcgacaacttttcttttctggaactcgagcgaggggaaatgctgcttggactgtcggacggcatgggctccgggagcagtgcctgcaaggagagcgagatggtgctggatcttgtggaacgttttctggaagcagggttttccctggagacggcaatacgcatgatgaattcggcgatggtgatgaaaggggaaaatgacatctactccacgttagacctctgcatggtgaacctgtacagcggtatggcacgcctgtacaaggtgggagcggcggctgcatttatccggcgggaggatgaggtggagtgcattgcatcggaaaatctgccggtgggggcgcgtgcgcacctggatgcaaaaccgagggagatacagctaagtgacggtgattttattgtcatggtgacggatggtgtgttagaatacttacatgttccgaagccggaggagacgatgcgggaaatgattctcagtatcaaaaccaacaatccgggaattctggcaaaaaagattatggacagagtgatgctttttaccggcgggcgcgcacaggacgatatgacggtacttgcggcgtgcatctggaaaaaggcatagaatagaatgtgaaacgatagaggaaatgcgatgcagaagaaaggaatggaactggaggggcttgttaaatccggggatgtggtgcttgcgggcgtctccggaggagcggactcggtatgtctgctgcttatgctgcttgagtaccggaagcactgcgattttctcctggaggcggtgcacgtggaacacgggatccggggagaggccagcaggagagacgccgcgtttgttaaaaggctttgcgaaaagcggggcgtttgctgcaggatttatccggtggatgtcccggcgtatgccaagggacacggcctcggcgttgaggaggcggcgaggaagctccgctatgagtgcttcagggaggcagcagaggactatgacggcagaccggtgaagatcgcgctcgcgcatcatgcggatgataatgcggagaccatgctgttccggctgatccgggggagcggaatccacggactctacggtatgcgcccggcgcgcaggctcgcggagggtgtcacggtgatccgtccgctgcttggaatggagagagcggagattgaggcgtatctggaggcacagggacagccttactgccgggatgcgaccaatgaggataccgactacagcagaaaccggattcgccataaggtgatgccggaattaaaagcggtgaatacgggggcggtgcatcatatgatgcagagcgcacagatgttaagggagctgtcggattacctggaggaagagacgcgccgggcgacggagcgtgtgtgccgtgacaccccggatgcctgtgtgatcgatgcggttcttttttcagaatatcccgcacttttaatccgggaagtactgcttgtgacgctgcaaaaagtggcgggcagcagccgtgacatcggaagtgtgcatgtagaagaactgtgcacactgtatacaagacaggtcggccgtgtgatctgcctgccctacggcgtgcgtgcggagcgtgtgtatgagggaatccggctgtacagggaagagccggcggctgatatggaacgggagagcattgaggttaccggggagatgctttcgcgcgcagaaaaggaagaggtggtgcttgcgctgccggatggcaggctgcacctgcggatacgtgatttttcggggaatatgcaggaaatcccgaaaaaaacatatacgaaatggttcgattatggtaaaataaaatctggtctgcggctgcgcagaagagagagcggcgattacctgaagatagatgctgcaggacataccaagaagctgaaggaatattttgtcaatgagaagattccggcggcgaagagagacgctatatggcttctggcaacggggtccgagatcctgtgggtggcaggcgggcgcatcggcgccggctgcaaagtcggagagaatacagaaaagatattagaagtacggttaagcggaggaaacgattgtgaagatcaagaaaattaacgttcatctcacagaggaacagattgagcagagagtaagagaattgggagccgagatcagcaaggtgtacggagatgagccggtatgcctgatctgtattttgaagggatcggtattttttacctgcgaactggcaaagcgtattacttcaccggttgagatagagtttatgtcggtatccagctatggatcaggcacaagttccagcggtgtggtgcgcatcgtaaatgatcttggaaccagtattgaaggcaagaatgtgctggtaattgaggacatcatcgattccggcagaactttaagctatttgctggagaatttgaagacaagaaatccgaagacactcagactgtgtacgcttctggataagccggaccggagagtggtggatgtcaatgtggattatgtgggatttgtcattccggatgaatttgtggtaggatacggtctcgactacgaccagaagtaccgcaatctgccgtatatcggatttgttgagatagaggaataaaggagaaatcgattgaatagtaagagaagcagttacagaggatttggcatctatctgctcctgatacttgccatcataggtatctggtattggatggacggaaacacgtcaaccaacagttacacgcgggcacagtttgagactgcggttgcagatggaaatgttgcacagctgaagattgtaccgaaccgcggcgaggtgccgaccggtaatgtatacattacatttaaggactcctcgacacaggttctggcggtaaacgatgtaaatgatatagaagactatctgcgcgatcagcagtttacgtcttacaccgtggagaatccgccggagcagagctggatcgtgacgatacttccgtatctgattatttttgcggcgatgttcattttcttcatgattatgaccaatcaggcggctgccaattccggcggcggcggtaagatgatgaacttcggcaagagccgcgcaaagctcatgacagatgacccggcaaagcgggtgacatttgccaatgtggcaggtctgaaagaggaaaaggaagagcttgaggagatcgtggatttcctgcgtgccccgaagaagtataccaggcttggcgcgcgtattccaaagggtgttcttctcgtgggacctccgggaaccggtaagacacttctggcaaaggcgattgccggtgaggcaggcgtgccgttctttagtatttccggttcggattttgtggagatgtttgttggcgtcggcgcttcgcgtgtccgtgatctgtttgaggaagccaagaaaaatgcgccgtgtatcgtgtttatcgatgagatcgatgctgtcgcaagacggcgtggtaccggtatgggcggcggtcacgatgagcgcgagcagacattgaaccagatgctcgttgagatggacggtttcggtgtcaatgagggaattatcgttatggcggcgacgaaccgtgtggatattttggacccggcgatcatgcgtccgggacgtttcgaccggaaggtgcatgtgggacgtccagatgtcggcggaagagaggagattctttctgttcatgcgaagaacaagccgctcggggatgatgtcgacttaaaacagatcgcacagacgactgcgggctttaccggcgcggatcttgagaatcttctgaatgaggcggctattatcgcagcgaaggaagaccgtgcgtatattacacagacggacatcaagaaggcgtttgtgaaggtgggaatcggcgcggagaaaaagagccgcgtgatctcagagaaggaaaagcgtatcaccgcattccacgaatccggtcatgcgattctgttccatctgcttccggatgtcggtccggtctattccgtatcgatcattccgacgggagcgggagctgccggttacacgatgccgctgccggagcgtgacgacatgttcaacacgaaaggcaagatgctgcaggatattatcgtatctctgggaggacgtgtggcggaggaacttgtatttgatgacatcacgacaggggcatctcaggacatcaagcaggcgacccggatggcaaaggatatggtcacaaaatacggaatgtcagagaacattggtctgatctgctacgacaatgacgacgatgaggtatttatcggcagagacctggcgcacacgagaggctatggagagggcgttgcgaccaccattgacctggaagtgaagcggatcattgacgaatgttatgaaaaagcgaagcagatgattgcggagcaccgcgacgtgctggatgcctgcgcgaatcttctgctggagaaggaaaaaatcagccagcaggagtttgaggcattgtttgagcagtaattgtgcataacggcaatgaaaaaagaaaaaccgggcagaaggtactatacaaaatgaataaaaacgtgtgcacaaaattgtgaagtttgtgcacacttatctggcggggcatgctattataataaccgtaaaaaccccccaatacattatatatagtttttgctataccccatagtaaaaataccttctcctaaaaagacagcagttcgacaggctgtcttttttttgctttctagtaataaatggggtacgttttattataagaaacagagactatcacgttccagatgcaaccgggggcggcaattctaatcgcaaaatccggtatttctaaccatgccgcgtcggacatccctgatcatctgtgtttttccaagtttggacagtccccgtggtgtgtccgcaaaccacagacaatttaaggacttttgtgcgtgccccttcgtggcaccagaaagtccgctcattgtctgcggttttgccggacacaccacggggactgtccaaacgtggaaagacacagaacccgatgcccgacgcagcacggaagaaatcctcggattttgcttcaaagaattgccgccccggttacattctggaacttcatattttctgatattctcataataaaacgtatcccatttattgtcttttcttgcggagattcacaaacgtgagatagatatcatagtagatattttcgcggttctgctccgtaagcatctttaaatcgttatataattcccggtcgcttagaatcacatccaccatatcaggattgtactcggtgccgcgccctgctttcagttcgttcaataccacatcgaacggtttcgcgcggtggtaattgcggcttaagtaatcggtcgctgcatccagacagtcacagatgtggatcaggtcgatggcgtcccggtacggcgaggcggtattgtcaaaactgagcggataaccgcgggtaccgtcgtaggagcggtgatgtccgagcgcaaccggctggtagattaaaaagtccggatcggacgacagatagtcggagcccttctgcggatgtgtctgaataatgttgaattcgtagtcgtttaacttgcggtgctgcgtgttgatgatcgggatcatgccgtttttcccaatatcgtggaacaaagctgcgggaacgatatagtccagtacttccgcgggggaggcatagacatttccctccagataggaggacggaatccgcaaaagctccggccgtgcggctaaaatatgttttccgatcgcttctgcgagataggaaaccataacggagtgtgtgaatgtcgtgagatgtctggttacgaccagatctacgataaagttcattttttccatacggttctggaaagtcccaaggatcagcgggtgaaacgccaccagctggacgccgttgtttaacgtgtaggaattgagactggcaggctgattcatcagatagctggtaatcagattgcggtagcgccggtaagttgcctgcttaaactcttccttgaaatgcgtatgccccagcacgtcgatcaggttgagcggcagattggtataaaaagcaagcaggtcaggcgaggaaacctgaccgatggtctgcatcttgtggacataataatcgtccaggatctgccaggcagcttcccaggtgattgtaccattgcgtgcctgcacatagtggtaattaaatactgtgaatacagggcactcatagatggaaccatgctcgtgcaatatctcggagtaatagatctgcgtcatattctccagagaggacaggatcgcggatggtgcaataacacgttcaacgttaagaacagcgccgtacgcgcggaaatcgttgattgcacagtcacagagctgcggaatccgtggattggtggtatcgtactgacagaatttgggcatggtacggatctgacagagctcctcccagagccggtaagcggtctcaatgtctaagatgccaagacccggcgccacccggatcagattgtaataggcaataaaaatatagtcgcggcttgtagccgattcaaagaattcaatctgatcgcggtaagagagcactttggtgtagaaatatatagtcttatcgcgagaggtgggctctccggttcgtgagagctccatgtatgaaaagccggcgcagatatagagaaaaagcaggctttccgtatcgctgcggtcttcataatgtggaagcagaatatcaataatgcggatcagcagagccggttcggtatagttactgtagtaaaaatcacggcaaaaagaaagtaaaagatcatatccctcatcggacagaagagcaggattgctgcttagcggatagagatactgttcaagcagtatctgattgtccgcacagcgttgctgctggtcgtctgcacatgcgcgaagtgttgccagccattcctcacggctggcaggctccagaaggtgatcttcccaggcgagactgtgcatgaagttgtcatagtaagtatcaaaaaagtaacggatatccgtgttgctgatcatgtattcctccgcctgcgcatttaaatatgtgtgaaaaccacccaatttgtccataagcgcaaatataataatattataacaaatagatcataaatgtatatagtaatttggatatgcaggtggtcaaaaacgtgcatcaacggctaaaaaagaattaagaaaatttagaaattctttatttgcccctgcctgtgaggaggaatacaataaaggtgcggacggtaagatccgttgccgcaagaatggaacagggaggcagccatgtcgaacacgacaaaacttgcactggaggcatcacttaaaaagcttttgcttaagaagccggtggataagattacgatcaacgatctgacggaggactgtgggatcagccgcatggcgttttactatcacttcaaggatatttacgacctgattgagtgggcgtgcctggaggacggaaagcgtgcgcttgcggataagaagacgtacagtacgtggagtgaaggactggagcagatctttgaggcggtattggagaacaagccgtttattttgaatgtttatcactcggtcagccagaagaagatcgagagctatctctataagctgacctatgatctgctcgcagatgtggtagaggaagaatgccgcgatgcggctgtcagcggggaggacaaggcactgattgcggagttctacaaatacggctttgtaggtatgatgctgcactggatcgacggcggtatgaaggcggattacagagagcttgtgcagcggctgagtacgatgctgcacggcagtatcttaaatgccgcccggaattttgaacagaagcaatccgcaagcttagcaaaagagacggaatgataagttttttatcattttgatctttttgtaaattgtgtcattcatctgggcagactaagataaggacacaaagaatttacagcataagtggaaaggtggtagttacgatgggaaaaggaaaacatataggacttggcgtggctgcgctggcagccggagcgggtgtggcggcactggcggcaggcagccataagaacagcagcgagcgtgcgcagaagaaagcaatcgaggagaaggcgagagcggaataccgcaataccgagcgcggcaagcatgagaagaacagcaagggtatttactataccaacggtaattacgaggcttttgcgagaccgagaaagccggagggtgtggatgagaagagcgcctatattgtcggcagcggactggcctctctggcagcagcctgcttcctggtgagagacggtcagatggaaggttcccacattcacattcttgaggcaatggacatcgcgggaggcgcctgcgacggtatcaatgatccgaccagaggatatgtgatgcgcggcggacgtgagatggagaaccattttgagtgtctgtgggatctgttccgcagcattccgtcgattgagacgccgggcgtctccgttctggacgagtattactggctgaacaaggaagacccgaactattccctgtgccgtgccacagaggagcgcggcaaggatgcgcacacagacggcaagttcaatctgagccagaagggctgcatggagatcatgaagctgttcatgacaaaggatgaggatctctacgacaagacgatcgaggatgtgttcgacgacgaggtattcaattctacgttttggctgtactggcgcacgatgtttgcttttgagaactggcacagtgcactggagatgaagctctatttccagcgtttcatccatcacatcgcgggactgccggatttcagcgctttgaagttcacgaagtacaatcagtatgagtcgctgattctgccgatgcagagataccttgaggaagccggtgttgacttccagtttaacaccgaggtaacgaatgtcattttcgacatcaaagatgacaagaaggttgccaaggcgctcgagtgcaaggtcaacggtgtggagaaaggtattgtgcttacggagaatgatctcgtgttcgtgacaaacggaagctgtaccgagggtacgatttacggtgatcagaaccatgcgccgaacggggacgcggaagtgcgcacgagcggctgctggagcctgtggaagaatattgcaaagcaggatccgtcttttggacatccggagaagttctgctcggatgtggcgaagacgaactgggaatctgcaaccgtgaccacgttggacgacaagatcattccgtacatcacgaatatctgcaagcgtgatccgagaagcggaaaagttgtgaccggaggtatcgtaagctgtaaggattccagctggctgctcagctggacgatcaaccgccagggacagttcaaggatcaggataaggataaagtatgcgtgtgggtatacggtctgttcaccgatgtgccgggcgattatgtgaagaagccgatgaaggagtgtaccggtaaggagatcaccgaggagtggctgtatcatctgggtgttccggtggaggagatcccggatctggcagagaacagcgccgtatgtgtaccgacgatgatgccgtacatcacagcgttctttatgccgagaaccaagggcgaccgcccggacgtcatcccggatggctgtgtgaactttgcgttcctcggacagttcgcggacacaccgcgtgatacggtcttcacgacggaatattcggtcagaaccgcaatggaggcggtatacggactgctcggtgtagacagaggcgttcctgaggtatggggaagtgtctatgatgtcagagagctgctcgacagcagtgtgaagctgatggatggaaagtctccgcttgagatcgaactgccgggaccgctcaatgtattgaagaagccgctgcttcgtgtggtcaagggaaccgtcgtggagaagctgctccgggatcatgatgtgatcaaggatggtatgttatagggaatcctgatgtgtagaaaactctgatttcctgaatgaacggcaacgcccggaaagcctttggttttccgggcatttattgaaaataggtgacactttttaaatttataacttgcatatctgtttaggctgtgatataatttacctctgtcaggacacattgacaaatgggcagattcccgagtggccaaaggggacagactgtaaatctgctgcaaattgcttcggtggttcgaatccacctctgcccatgaattgttgaaagaaccattgccgtaaggcagtggttcttttttgcttttcacaaagttcaacgcgccttcatgactggtttaccggtaccgatctttacaaaaagaatctggaatcctatgtgagaaaagaaggtatgcagatgaaaaccaaggtcagtatcgtcgccactgtgacgcttcttatggcgatcggatttatctgtatgaaaaatgtgcccatcggacggattgttttatccgttgtgtgggtatgtcatgtcatctactttttttgctttgtaaagacacttccggaagaaaaaacaggaagcgggggaatcgaatatgaagaataaacgcagcctgcatttttgtaatcctgctggtggcgcatatggtccagcacagaatgtctggcactgcatcataatacatgcaggagaggaatgcttataaaaaccagattttctcatttgtggaggagatactggtcgcgcctgcatccaaaagagcgaggatgtcttccttttcggagaccagcccgccggcaatgaccggtgtggaggtggactgacagactttggcgatgaccttgggcatcagtgccggcagaatctcaatcagatccgggcgggaggatttgacctggcggtcgatgttctcgtatgccatggagtcaatcagaaacagccggaggattgtaaagagccccagctccttggcgcgtttgataagtgtcggcttcgttgtgataatgccgtcggcattcgtgtatttttgaagaaagtcgactgccacttctttggaactcagtccattgatgagatccagatggacgatcgcaagctttccggcggatttgacggtctccacgatgtcactgatagtgacgatgtcgccgtataagataaagataatgcggctgtcgctggtcaggcatctggaaagacctttgtcgtctttgaccgctgcaatgatgggagaatcctccagggcttctttaaataatttcttcatgacaatctcctgtattcggtgaatcaataaggtcatcatgccgatcgcatgatgaccttattatataataaagtgagattctttgaaagcgcttattttgcaggaacatttctggcggcaatgatgtcgacaccagttccggcaacgtcggataagaccacatcgccgatcttaagcggtgcattgacggtgatatcctttaaggcgttgacacagtcgaaaatcctgcctttcggaatgtcggaggctgttttcacgtttgccatcgggtagatgcctccgttcacccggaccgtcgatgttacgatacgggtcggattcgtaacttcctttctggcgtaggcatcgcctctcggacaggtattgccggtgacggcggtgacggtagatccgtccatggtaactgtgatggcgcacccgagcgggcagccgatacaggtcaattctcttgtgctcatgatgattcctccattctatttatgaattttcttcaatgcggattgtgattctggacagatccgggaattcagcaagttttttcttgtcgagaattacctgctccatctcgccgggagccataaccggacgtttgcgcttgctgattaaggtgtcattaaagtaagtcgcaatcgagcagttcttgtataccgcgcccacacggaagcggacggttaaagtgtcgtccatctcggtcggacggacatatttcggaacggtgtagcgcacgccgtccaccgggaaaatctcgacggatgcggcatctttgctggagccgttttggatataagcggcggcatttttcccggctgcggttgcttcctgggaaacatagtccacaaggtcatgtacatgaaggacatttccacaggcgaacacgccgtcgatgctggtctctaagctgtcattgacgattggaccggaggtgacaggattgatggcaacgcctgcgctgcggctaagctcgttctccgggatcagtccgcaggagagaagcagggtgtcgcaggtgtagcgctcctcggttcccggaatcggtttgcggtccggaccgacttctgcaattgtgacagcttcgacacggtttttgccctcaatgtcgatgacagtgtgactgagcttcaacgggatgccgaaatcatccagacactgtacaatgtttcgcttcagaccgccggagtaaggcatcagttcggcaacaaccttgactttcgcgccttccagcgtcatgcggcgtgccatgatcagaccaatgtcgccggaacctaagatgacaacttcgcggcccggcatatagccttccatgttgaccagacgctgtgccgtacctgcggaaaaaataccggccggacgatagcccggaatatttaaggcacctctggaacgctcgcggcagcccatggcgagaatgaccgcttttgcgtggatctcaaacatgccgtcctcgcggttcatggcggttactttttttgtgattacgtttccggacggggcatcggcagcaatgtccatgaccatggtatttaatttgtactcgatgccgcgctctgccacctgctcgatgaagcgggaagcgtattccggtccggtcagctcctccttgaaggtatgtaagccgaaaccgttgtggatgcactggtttaagataccgccgagctctttgtctctctcgatgattaagatgctctcgatgccgtggtctcttgcggatacagcggctgcaagtccggcaggacctccgccgacgatgactaaatcatagtttttcatagtagaatccccctttaaatctctttgttgatgccgatgacgatattgccgccgacgccgtttttggtaatatcaaacatactcattggtacttctcgctctaagatctccatggtacgcggggagcagaaacctgcctgacagcgccccatgccggctcttgtgcggcgttttactccgtcgagggagcgggcaccgagcggacggtgaatggcgtccatgatctcgccctcgctgatcatctcgcagcggcagatgatgttgccatattccggatgctctttgatcagctgattgcgctcctccatggaaagtgtctccggtcttaagatgccttttcttgtggagataaaatctgtttttttcgtaagggaaagaagatcagcggcgatacctgcgaccatctctccgattgccggtgcggaggagagtcccggagattcaatgccggctgcgttgataaaacctttcgcgtcttccgcttccccaatgatgaaatcgttgccgtcttcgtgtgcgcgcagacctgcaaatgaggtgataacctggcgcatcggaacatttttgacgcttaaagcagcagtctttgcgagggaatccagtccgtcctgtgtggtgttgactgcttccttattcgtgacatccactgcggttgggccgactaagaggttgccgtgtacggtaggagtgacaagcacgccttttcccattttggatggaagctggaaaatcgtgtgcgatacatgcgttccggcttctttgtcgagcaggcagtattcgcctttgcgggcggtaatatgaagcttgtgttcacttaccatattgttaaattcgtcagcgtgaacgccggcggcattgatgatgaccttcgcctcaaaggtttccggtgtatccgtgtcggtgtggatggtctctaacgtgtaactgccgtcttttttccgaatggaagtgactttggtatttaagaaaaaggaaacaccgttggtgtatgcgttttccgcaaatgccatggtcatgtggaacgggcagacgatgccgccggtcggggcatacagaccgcaggtcacgtcgtcgcttaaattcggctccatctgaagcagctcttcgcgctctaagatgcgaagaccaggtactccgtttttctcacccttttctaaaagggcatcaagaccgctgcggtcctgatctttggtacatacgacgagggaaccgtttctcttaaacggaatgtcgaggtcttttgagagggcatccatcatctcgttgccgcggacatttaactttgcctttaaggaacccggggctgcgtcgaagcctgcgtggatgatggcactgttggctttggaggtgccgtcacagacatcctcttcgcgctcgatgacacagacgttcgcctggtatctggataattctcttgcgattgcactgccgatgactccggcaccgataattgctacatcatacataatacattctccttttctttgaaatacaaaaagagcaaggcaaacaaaaacgatctcatcgtctctgctcttaccttgctcatgtctctcggtaattcttatgaacttaactatattataacacgaaatgaacaggatgcaagacctgattgaaaaaaacagacattgcatctggctttgcaagaaagtgccccatatcatcacgaattagggtataatgtgaataagcaatgagcagtgcagacaggagaagtggcgcgttctgtgctggcgcagagaacgcgccgctgcaagtggctgatagtgcaaatgcacgtcagcgtgaaaaaaacggagcgttttcacgcggcactgcgaagaaatgccggacacctgcgtggaaaggacaacatgtcatgggaagaggaagaagcgagaagcagaaacagaagctgctttacatggcgcagcttttatatgggagaacggacgaggatcatcctgtgacgacgcaggaggtgatcgactatctggaggcgaacggaatccgttcggagcgcaagacagtgtacaccgatatggaggaactggaagatttcgggctggatattatacgggtgaaggagcgacccggcggatattatcttgccagccgcaaatttgaactggcggagttaaaacttctcgtggatgccgtgcaggcgtcgaagttcatcacgacgaagaagtcgagagagctgattgccaagctggagacgctctgcggtagggaacaggcaaagcagctccacaggcaggtcgtggtgaccaaccgcagcaaggcggtcaatgaaaacatttattataatgtagatatgatttacaatgccatcgcggaaaatgtgaagatccgttttcagtattttgaatggacggtcaataaagagatgaaactgcggcgggacggcagttactatgaagtgagtccctggctgctctcgtgggatgacgaaaactattatctgatcgcctacgacgacagaagccgcgacatccgccattaccgtgtggataaaatgctaaagatcgaacttacggcggaaagcagagaggggaaggagcagttcgggagctttgacgtggcggcatattcccgaaaaacgttcggcatgttcgcgggggaggacgagactgtgaccttaatctgcgaagacgccctcacgggagtcatgatcgaccgtttcggcaaggaggtcgcgatgcgccggtatgatgagacaagaatccgggtgcgggtgagtgtcgcggtcagccgccagtttttcggctggctggctggacttggcgcggcagtgcggatcgagtcgccggaacctgttgtgcgggaataccgcgagtatctggaaactattttgaaaacatacggggagcaggaactatgagagagcgcacttatgagataaagatagagggcgtgccgatcattgtcacgaaaaaacggatgaaaaacatgtatctgcgcatcagtaaagaggacggtacagtgcggatctcagcgccgtatcagatgagtgatgcgcggattgcggcatttgccagagaacggatcgaatggatacggaaatatcagcagaaatacaaagaagccggagagcgccgttcggaaaaacaggaactggatgcggcagaaatcgcgcgcagaaagaaacagttaaagcgtgaggtggagcgtcttgtggcaaaatgggagccggtgatgagggtgaaagtctccggaatcaccatccggcagatgaagacgagatgggggtcctgcaatgtgcagacacatcacatcaacatcaatctggcgctcttgtccaagccgccggagtgcctcgagtatgtcgtggtacatgagatgacacatattctggaggcgagccacaatcagcgcttctggggatttatgacgaagttttacccggactggaagcgcgtgcgaaaatatctaagtgacgagactgtggattagcgtgccggaagaagcggggctgacggatcagataaactgattggtcgccggatcgtactcgtagtctatattttttaatgcagagataacctctgcggcatcaatctggtaggttgcagcaaattcttccagcgacgggtagtggtcacgaagctgtgtgttgacaaagcttaagagcatgacgggatctttgggaagtgtattcatggtatgggttcctcttttcttaattttatgttaaaatagcacggcacacgagaaattgcaagaggtgaaacgaatgggacagaagatagacaaggaagtatttgataaattttttaaagagagttactgcaccgtcgaatatgagacggtcaaggaggagtttgagcggatcgcatcgatcgggaacgatctgtttacgggaagctatgaggcgagaaacctgaaccgcgagaactttattttatatctgaccagtgacagctattgtgattttgaggctgccgtgcaggaggcgatggatgatctgaacccggagattctggatgcggtgatggatgtgacggaagcgcaggaggacggcgatgagatcacggaggtctactgggatacccagagggaattgctgcatgattttctgctgcggctgtacgatgaagtgatttcaacatggaaatagaacagaaatgcgaaaaggaggacgtcttatggcgaaggcaagctgtgacagctgtgtatacaatgtgtacgatgaagatgacgagacctactattgtgaagtggatatggatgaggatgatgcggcgagactgatgcagggacattacagggaatgtccgtattatcagctggacgatgaatatgcggtggtaagacaccagatgtaaaaagggaagggcgcagctttaaagctgcgctcccttccttttttatctatcttatttctcgctgcaccgaatcgaagcttccacaaagcctttaaagagcggatgcggacggttcggtctggactttaactccggatgagcctgtgtggcaacgaaccacggatgctccggaatctcaatcatctctacgattctgccgtccggagaggtaccgcagagcttcatgccgctctcggtgagagaagcgcggaagtcgttgttgacctcataacggtgtctgtgtctctcatggatctcctcagcaccgtatacctcgtatgccttggaggtcttgtccagaatacacggataagaaccaagacgtaaggttccgccgatgtcctcgatgccgttctgatccggcatgagtgcgatgaccggatgcgtggtgtttggatcaagctcgatgctgtgcgcatcgttgaagccgcagacatgtcttgcgtactcgatgatcgcaacctgcatgccgaggcacagaccaaggtacggaatctgatgctcgcgtgcgtactttgcggcaaggatcattccctcgacaccgcgggaaccgaatccacccggtacgagaatgccggatacatctgataagatctcgtccacgttctctgttgtgacgtcctcagaatccacccacttgatattgacggttgcgcgctccgcaatgccgccgtgcttcaacgcctccacaacggagatataagcgtcgtgaagtgcggtatattttccaactaatgcgacagtcacttccttgttcggatgacggagtgcgtcgaccattgcctcccagtcctttaaatccggttccggacagtccagatgaagcgcttcgcaggcaaccttggcgagattctccttctccatggcaagcggcgcctcatagagatattcaacgtcaagattctgaagtacattgcggttcggcacgttacagaacagcgcgatcttgtccttgagactctgatcgagcggatgctcggaacggcagacgatgatatccggctggatacccattccctgcagctctttgacgctcgcctgtgtcggctttgtcttaagctcgccggatgccttgatatatggaatcaatgttacatgaatgaggatggcattctcgtgccctacttcatgctggaactgacggattgcctcgaggaacggctgactttcgatatcgccgacggtaccgccgacttcaatgatggcaatgtgtgtctcctcggaagtaaagttccggtagaagcggctcttgatctcgtttgtgatgtgagggatgacctgtacggtacctccgccgaaatcgccgcggcgctccttctgaagaacagaccagtataccttaccggttgtaacgttggaattcttggtcagactctcgtcgatgaaacgctcataatgtcctaagtccagatctgtttctgcaccgtcatcggtcacaaatacctcgccgtgctggatcgggttcatggttccgggatcgatgttgatgtacgggtcgaatttctgcatggtcactttgtagccacgggcttttaaaagtcttcccagagaagcagccgtgatacctttcccaaggccggaaacgacaccaccggtgacaaagacatattttacaggcatagggttttcctcctcatataaaagtacagttgtgtaaataatagtaatacgctctatataacccatacagtatacaactaagtgtccggaaaatccagcacaatttcaaaaacacagaaaatagtatgccgggaaattttagaattattttagaaatgacaggaaaacttcacgaagaacgtattgcttttaaattccattttcaatataatatagaagatatacgataagaatccagactctgaactggcggagcctgttggaaaggataaatacttcaatggacaatcagggatcaaataacaattacaataacggtaattcaaacggagggaataacggagacggcggcaaagggaatcacaatggccagattttgatggcatttatactgatttcactgattgcgctgtttattatgagtcttgtaaccaatcagttcaatcagatgagcacgcaggaggtgtcctactcggagttcctcgacatggtgaacggcaccggcaaatgggaaggcagaagcgtgaagtcggtggagatcggttcctatcagatcgacatcacactggattccgatgagaaaacgccatacgaggtaacgtattactgcgggcgtgtggcggatgatgaactgattccgttacttaaggaaaagggggtagatatcagcggagtgattccggataatacgtccacctggatttacagcatcttaagctatctgattccgctggtgttgatctgggttgtgctcggcgtagtgatgcgccggatgggtggcggcgccatgggcgtcggcaagagcaatgccaaagtttatgtggagaagcagaccggcgtgacgttcaaggatgttgcgggacaggatgaggcgaaggaatcgctgcaggaggtcgtcgatttcctgcacaacccgaaaaagtaccgcgacatcggtgcgaagctgccgaaaggtgcgcttcttgtgggacctccgggaaccggtaagacgctccttgccaaggcagtggcgggcgaggcgaaggtaccgtttttctcgctggcaggttcggattttgtggagatgttcgttggtgtcggagcttcccgtgtgagggatctgtttaaggaagcacagaagcaggcaccgtgtatcatctttatcgatgagatcgatgcgatcggtaagagccgtgacacgcgttacggcggcaacgacgagagagagcagacattgaaccagctccttgcggagatggacggctttgatacgtccaagggaattctgattctcgctgcaaccaaccgtccggaggtactggacaaggcgctgctccgtccgggacgttttgaccgccggattattgtcgataagccggatctgaagggacgcctggagacactcaaggtacattccaaggacgtcatgatggatgagaccgtggatctggatgcactggcacttgcgacggcaggtctggtgggttccgatcttgccaatatgatcaatgaggcagcaatcaatgccgtcaagaacggcaggaagtttgtcaaccagtccgatctgtttgacgcgtttgaacttgtggcagtcggcggcaaggagaagaaggaccgcgtgatgagcgacaaggagcgcaagatcgtgtcctaccatgaggtcggccacgcgatggtgacggcgcttcagaagaacaccgagccggtacagaagatcacgattgttccgcgtacgatgggagcgctcggctacacgctgcagacgccggaggaggagaagtatctccagaccaaggatgaacttttagcgaagattaccacttacatggcaggacgtgcagcggaggtgctggtattccagtcggcaaccagcggtgcggcgaacgatattgagcaggcgacggcgattgccagggcaatggtaatgcagtacggtatgtccgataagttcggtatgatgtgcctggcgacggtggagaaccagtatctggacaaccgcgcaggactgatctgcggtgaggacacggcggcgcagattgataaggaggtacttgccattatcaatcacgcatatgatgaggcgatacgtctcctcacggagaaccgggaggtgctcgatcatatcgcagaatacctctacgagcatgagacgattaccggtaaggaattcatgaagattttccgtgaactgaaaggaatcccggagccggaggacgaggcggagaagaagacgttcttcgagcaggcggaggaagcccgtcaggaactcgaggagggaaaaactgccgcagagagtcagaacatggatgatgtattgctgcgcaatacgcaggatcatgaggaacagtaatgtttgtaattgaagaagaacttaaaaaactcccggatcagccgggagtttatattatgcatgacagccgtgatgccattatctacattggcaaggcggtcagtctgcgcaagcgggtgcaccagtattttcagccaagccatgatgagggtatcaaaaaagcgcagatggtaaaacagattgcgcggtttgagtacattgtgacggattccgaactggaggcgctggtactggaatgtaatctgatcaaagaacatcggccgaagtacaacaccatgctgcgggacgataagacatatccgtacatcagagtgactctcggggaagattttccgagagttctcttttcccgccagcagaaaaaagacaaatcgcggtactttggcccttacacgagcgcgggagcagtcaaggatacgatcgagctggtgaacaagatctatcagctgcgcacctgcaaccggaacctgccgcgcgacacggggaaggaccgcccgtgcctgaattatcacattcatcagtgcacggcgccctgccagggatatatcacaaaggaagcgtaccgtgagcgcgtggatgcggtggtggaatttttaaatggcaattatgcgccggtgctaaagtctctggaagagaagatgaatacggcgtcggccaatctggaatttgaaaaggcgattgagtaccgggagcttttaaacagtgtcagacagatcgcacagaagcagaagattacgcacacggacggcgaggacaaggacattatcgcgctggcggcggatgaccgcgacgcggtggtgcaggtattttttatccgcgacggcaagctgatcggcagagatcacttttatgtgaagatcgggacggaggataccaaagcccagatccttaccacgttcataaagcagttctattcgggaacgccgtttattccaagagagattatgctgccgcaggagatcgaggagcaggaggtgcttgccgactggcttggcgaaaagcggggcagcaaggtttacatccgcgtaccacagaagggcatgaaagaaaagctggtggaactcgcacagaagaatgccaagatggttcttgcgcaggatcgtgagaagatcaagcgcgaggaaggcaggacgatcggcgcgttaaaggagatcgaacagcttttagatatgaagggattaaaccgcgtggaggcgtacgatatctcgaatacgagcggctttgagtcggtcggctccatgatcgtgtatgagaaaggcaagccaaagcggagtgattaccggaagttcaagctgcggacggtgtcgggaccggatgactatgcctccatgtatgaggtgctgacgagaagatttacgcatggcatgcgtgagatggaggagatggaagaaaaagacctgtcggaggagtatggcagtttcacaagatttccggatctgatcatgatggacggcggccgcgggcaggtgaacatcgcactcaaagtgctggaggagctgcatcttaatattccggtctgtggaatggtcaaagatgataatcaccgcacgcgcgggctatactatcataatgtagagatacccatcgaccgtggaagcgagggatttaagctgattacgcgaattcaggacgaggcgcaccgttttgcgattgagtaccaccggtcgctccggagcaaggagcaggtacattccgtgctggatgacattccggatatcggaccggcaaggcgcaaggcgctgatgaaaaaatatcagtcgctggaggcaatccgggaggcgacggaggaagaccttgcacagacggacagcatgagcccgcaggcggcgcgctcggtttaccggtttttccgggagaaagaacgggaaaaccagccgtccgattagttgaagattccatgtgcctatggtataatttgcacaaaagtaaatcacatacaaaggagcgtaagggatgagtggtgttggtgtagcaaaagtggcgcagattctcgatctgtgcaattttattccgcagatggaattaaaaggacatcggatcatgatccgtgatgtcaaccgtccggcattgcagctgagcggctatttcgagcattttgagcagtcccgtgtgcagatcatcggtaccgtggaatacacgtatctgcaacagctggatgagaagaaaaaagaagcgatctaccgggagtttatggcttacgatattccgtgcgtcattttctgccgtgatttaaagccggacgagatgttcctcaaaattgcggaggagagcaatctgccggtattcggaaccaagcgaagcacatccgagttcatggcggagctgatctactgcctgagcgagcagctggcaccgtgcatcaccattcacggcgtgcttgtagatgtctacggcgagggacttctgattatgggagagagcggcatcggtaagagcgaggcggcactcgagcttgtgcgcagaggacatcgcctggtaaccgatgatgtcgtggagatccgcaagatcaacgagcatacgctgatcggtacttcaccggacatcacacgttactttatcgagctgcgcggaatcggcatcattgacgtgaagacgctgttcggtgtcgagggagtcaaggagaagcagcagatcgatctggtcatcaagctggaagactggaagaaggataacgagtatgaccgtctgggacttgaggaggagtacacagagttcctcggcaataaagtcgtatgtcattcgcttccgatccgcgccggacgtaaccttgcagtcatctgtgaggcggcggcagtcaaccacagacagaagaagatgggttacaatgccgcacaggagctgtaccgccgtgtacaggagaacctgacgaagaagtccgacgatgaggaagacgaatagatcaatataggttaggagaaacaacagcaatggaaagaatgaacgcatgggagaaatacccggaaggaaaaaagagaaacgaagtttttgattttgcagaggagtaccgtaagtttttgtcagactgcaagacggagcgcgagtgcgtcacctattttgcacagaaagcagagaaggcgggattcgtaaatctggataccgtgctggagaagggtacaaagcttgcagccggagataaagtatatgcaaacaatatgggaaaaggacttgccctgttcgtaatcggtgagaagagcatggagcacggcatgaatattctcggcgcacatattgattccccgcgcatggacttaaagcaggacccgctgtatgaagacacggatttcgcgatgctggatacccactattacggcggtatcaagaagtaccagtgggtgacactgccgctggctctgcacggcgtcattgcgaaaaaggacggcaccgtggtcaaagtgagtgtcggagacaagccgggtgatccggtattcggcgtgagcgatcttttgatccacctttccggagagcagatggagaaaaaggcagccaaggtcattgagggagaaaacctcgatctgatcatcggcagcattccggcggaagcggatgaaaaagacgacgtcaaggaaaaggtaaaagccaatatcatgaagatccttgcaaaggaatatgatatagaggaagaggatttcctctctgcggagattgaggtcgtaccggccggcgaagcgagagactacggctttgacagaagcatgattatgggctacggacacgatgacagagtgtgcgcatatccttcctttgaggcgattgcggcgatggagaagccggagatcacaagtgtatgccttctggtagacaaggaagagatcggaagtgtcggtgcgagcggtatgcagtcccgtttcttcgagaatacggtcgcagaggtgatgaatgcggcaggaacgtattctgaactggcactcagacgtgcactgaagaactcgagcgttctctcttcggatgtatcggcggcatttgacccgaacttcccgtccgtgatgacgaagcgcaacgcagcatattttggaagaggacttgtgtttaacaaatataccggagccagaggcaaatccggatcgaacgatgcgaatgcagagtacgtgggagcactccgcgcgatcatggaccgcaacgaggtgtcattccagacggcagaactcggcaaggtagaccagggcggcggcggaacgatcgcctacattcttgccaactatggcatgcgtgtgattgacagcggtgtggcagtgctgaacatgcatgcaccgtgggagatcatcagcaaggtggatctgtatgaggcatatcgcggctatattgcatttttaaaggaacaggcatgaaacaacagttattggatacgttagaacagatcgcaggaaaagaaaatattcatccgaacgagccgatgagccgccacacgacctttcgtgtgggcggtccggcggatgtgctggtgacgccggaagcggggaagcttgcagcagttaccggtgcatgccgggaggcgggagagccgtattacattgtcggaaacggcagtaacctcctcgtgggagacggcggcatccgtggggtggtcattcttaccagagacgggatggatgagatttcggcagacggcgtgcggattacggcgggagcgggagcactcctgtcacgcacggcgtcgcttgctgcgtcacatgcgctgaccgggatggaatttgcagccgggattccgggaacgatcggcggtgcagttgtgatgaatgctggagcttacggcggagagatgcgggacatcatagagactgtgactgtgctcgatgagacgggagcacagcatgtgctgtccgtggaggagctggagcttggctaccgcacgagctgcattttaaagaagcactatattgtcacacaggcggtattgaagcttgcagcgggagaggagcaggccatccgggcacggatgaaggaacttgccacgcagcgcgccgaaaagcagccgctcgaatatccgagtgcgggaagcacatttaaacggccggagggatattttgccggaaagctgatcatggatgcgggattgcgcggataccgggtcggcggagcacaggtatcgcagaaacactgcggatttgtggtcaacacagggaatgcgaccgcacaggatgtgaggacgctgattgcggatgtgagcgcagaggtggacagacagtttcaggtgaagctggaaccggagattaagatgcttggcgaattttagcccgatagacaaagataacagcaggatacgcaggaatggagagtgactggcatgaagttcgtgattttgaccggaatgtccggagccggaaagagtacggcaattaagatgatggaagatatcggatactactgtgtggataatcttccgattgcattgcttgaaaagttcgtggagctgtcgagcctgcaggaaaatgcagaactgcagaaagtggcggtcggtattgacatccggaacggccaggcactggaagagatacgcgacgtgcttgcgcggatcaaaaaaaagaaggttcactacgagattctgtttctggatgcagaggattctgtattggtcaagcgctacaaggagaccagaagaaaccatccgctgtccggcggagaccgggtggacaagggcattgaagaagagagaaagcgtctggcttttttgaaagagagtgcagactatattatagataccagccagcttctgaccagggagctgaaagcggagctggataagatttttgtgcagaatcaggactataagaatctgtttatcacgattctgtcgtttggatttaagtatgggattccggcggactccgatctggtctttgacgtgcgttttctgccgaatccgtattatgtggaaggattgcgggcaaagacgggcaatgacaaggagattcaggactatgtgttccagtatgaggaggcgcatacgtttttggacaagctcgaggatatgctgaacttcctgattccgaattatattgcagaagggaagaaccagcttgtaatctccattggctgcaccggaggaaagcaccggtcggtcacgctcgccaatgcgctgtatgaacggctttccggacaaaagggatacggactgaaaatagagcaccgcgacatcggtaaagatgcgctccgcgggaaatagaccccgcagacaaaaggaagagccgatggacgcgagggacggttggagtaagctatgtcattttcaagtgaggtaaaaacggaactggcaaaacatctgggaaaaagcagacattgccagattgcagagctggcggcgctgattgcatttgagggaagaatccctgcggcggaatcggagaaccggctgctgatgcaaaaatatcagctgctgttagcagaactgtttcatatagaagaaatccataccgaggaggaggcgcgcagcgttttttccacggttaaaatgtacaacgatgccacgggggaggcggagccggaagatacagtcaagggactcctcattcagcagagctgctgcaagagggcgtacataagaggggcgtttctggcgggaggatcgatcagcgatcccaacaaatcctaccattttgagattgtgtgccgaagtatcccgcaggccgagcagcttcgggatgtaatcaacagttttgacatggatgccaagattgtggcgcgcaaaaaatatcaggttgtgtacttgaaggaaggctcgcagattgtagatattctaaacattatggaggcgcatgttgcgctcatgaatctggagaacgtgcggattctgaaggaaatgcgtaattcggtgaaccgtaaggtgaactgcgagacagcgaatatcagcaagacggtaaacgctgcagtcaaacagcttgcggacattgaatatataagagagacggccggcttgtcatatctgccggagaatctcaaagagatggcactgcttcggctggaatacccggatgcgccgcttgcagaactgggaacctacctgaatcctcctgtgggaaaatcaggtgtgaatcacaggcttcgcagaatcagcgagatggcagacagcctccggcagcagacagtgtaaggtgtaagttaaaaagcgaggatgggaggatgcaatgaaaaagagtgtggtagtaaagatgcagcaggattttgaggcaagaccgatcgcaaatctcgtgcaggtggcaaaccggtatgaaagcaaaatctatctggaacatggtgacagccgtgtcaatgcgaagagcattatggggatgatgagtctggcgctattaaacggtgaggagattcttgtggatgcagagggagcggacgaagcggaagccgttgcagcgattgaggaattcctcgtctcatagaaagaaataagataagggtgtataaataatgggtacaaagaaaaagttactgtttgtgtttaatccgttttcaggcaaggcacagatcaagaatcagctgttggatattgtggatgtgatggtgaaggcggattatgaggtcaccatctatccgacacaggcacagggagacgcgatacataagatcgagacggaagtcggcgattatgatctcgtcgtgtgcagcggcggggacggtacgctggatgaagtggtgacggggatgatgcaccgtgagaaaaaggtaccgctcggctatattgcagcgggcagcacaaatgattttgccacatcgcttggcattccgaagaatatggtcaaggcggcagagacagccgttgcaggacgggtgttcccgtgcgacatcggagcgtttaacggggacttcttcgtgtatgtggcggcgttcggactgtttacggaagtttcctacaagacgagccaggagtggaagaatgtgctcggacacgcggcttacatcttagagggcgcgaagtgcctgcatgatatcccgtcgttcctcatgcaggtagagtatgacaatgtgcgtcttcaggacgagttcatctacgggatgatcagcaactccacctctgtgggcggatttaaggggatgaccggaaaggacgtcctgctggatgatggagtcttcgaggtcacactcatcaaaaagccgaagaacccgatcgagttaaacgagatcatcgcatcgttgatcaatcttgtggacgatacggacatgatctactcgtttaagaccagcgaggtgcggttcacggcgaagaatacgattccgtggacgctggacggggaattcggcggcgaccatgaggaggttgtggtgaagaacctgtgcagggcggtcgagattatggtgccgcagggcgagtgagagaccttgtcgggaagtatgttttgttaaaaatttaactttattttttacaggaagtaatatataatagcggtagggtaaaaacaactgccgcattgcggtaaattgattaagttatggaggaattcattatgttagtatctgcaaaagaaatgttagaaaaagcaaaagctggtcattatgcagtaggtcagttcaacatcaacaaccttgagtggacaaagtctgttctcctgacagcagaagagttacagtctccggtaatccttggtgtttccgagggcgctggtaagtatatgaccggtttcggtacagttgcagcgatggtaaaggcaatgcatgatgagctcggtatcacagttccggttgcacttcatctggatcatggtacatacgaaggatgctacaagtgcatcaaggctggattcacatccatcatgttcgacggttcccactatccgatcgacgagaacgttgagaagaccaaggagctggttcaggttgcacatgcaatgggaatgtccatcgaggctgaggttggttccatcggcggcgaggaagacggcgttgtcggcatgggcgagtgcgcagatccggacgagtgcaagcgtgtagctgatcttggtgtagatatgcttgcagcaggtatcggtaacatccatggaaaatatccggcaaactggaagggcttaagctttgagactctggatgcaatccagcagaagacaggcgttatgccgttagttcttcacggtggtacaggtatcccggctgacatgatcaagaaagcaatctctctcggtgttgcaaagatcaacgtaaacacagagtgccagttatctttcgcagatgctacacgtaaatatatcgaggctggcaaggatctggaaggcaagggctttgacccgcgtaaacttcttgctcctggcgcagaggcaatcaaggcaactgtaaaagagaagatggagctgttcggttccgtaggtaaggcaaacgactaattctttatggaatgaagttgttttgtcggacaacagaattttttcacaataatttgactagaactttattatttttgttagaagtgtaaaaattaaaaatatataaagttttcgcttgcatttcgttttaaaaagtattatcttaataccaataaaacgatgtgagcgatgaacaagggtgttccaatagacttggaatgcccttttttctgtatacagaactttacatgaagttctggttgaaatccgacaggaaatcgcgtacattagaataagcaagtctggtcttaggggattggattagtgagaagaaaggatgtagaagatgagcgaaacaggataccttaatgcagcagagattttcggtgaaaacgtattcaacgatgcagtaatgcaggaacgtcttccgaagaaagtctacaagaagttaaaggaagtaatcaacgagggaaaagaactggatctcgagacagcggatgttgtcgcacatgagatgaaagagtgggcgattgaaaaaggcgctacccattacacacactggttccagccgctgacaggcgtgaccgcagagaagcacgatgcatttatcacagctccgatggagaacggtaaagtgctgatgagcttttccggtaaggaattgatcaagggcgagccggatgcttcttctttcccgtcaggaggtcttagagcaacatttgaagccagaggctataccgcatgggattgtacatcaccggcattcgtgagacaggatgcagcaggcgcaactctttgtattccaaccgctttctgttcttacacaggtgaggcgcttgaccagaagacaccgcttctccgctctatggaagcaatcaatgagcagtcacttcgcttattaaaattattcggaaatactacatcaaagaaagtaacaccgtccgttggaccggagcaggaatactttatcgtagaccgcgagaagtatttacagagaaaggatctcatctttaccggacgtaccttattcggagcaatgccgccgaagggacaggagatggacgatcactatttcggatcgattcgtgagcgcatcggtgcgtacatgaaggacgtcaatgaggaactctggaagcttggcgttacggcaaagacacagcacaacgaggtggctccggcacagcatgagcttgctccgatctacgcagaggcgaacgtggcagtcgatcacaaccagctcattatggagacattgaagaaagttgccggccgtcatggtttacagtgtctgcttcatgagaagccattcgcaggtgtgaacggttccggtaagcacaacaactggtcgatcacgacagacgatggcatcaacctcttagagccgggcaagacaccgcatgagaacatccagttcctgttagtccttacctgcatcttaaaagcagtagataggcatgcagatctcttgagagaggcagcagcagatgtcggaaacgatcacagattaggagcaaacgaggcaccgccagcaatcgtatccatatatcttggtgagcagctgcaggatgtgctttcacagctgatcagcactggtgaggcaacacacagtatctccggcaagaagttagagaccggtgttaagacgcttccggatttcatgaaggatgcaaccgaccgtaaccgtacatcgccgtttgcattcacaggcaataaattcgagttccgtatggtaggttcccaggattccatcgcccagtcgaacgtggtactcaacacgatcgtggcagaggcatttgcagaggcatgcgacgtcttagagaaggcagatgactttgacatggcagtacatgatctgatcaaggagtatgcaaccgagcatcagagaatcgtattcaacggcaacggatattcagacgagtgggtagcagaggcagagaagcgcggtcttccgaacatctgctccatggtagatgcgatcccggcactcaacacagagaaggcagtgacactgtttgagaagttcaaggtatttaccaaggctgagctggattcccgtgtggagatcgagtatgagacctacgcaaaagagatcaatatcgaggcaaaggcaatgatcgacattgctgcaaagcagatcattccggcagttatcaaatatacaacggtactggcacagtccatcaatgccgtaaagagtgcatgcggcgcagatatcagcgcgcagacagagatcctcacagaggtatccgatcttctggcagacgcacagaatgctctcgacaagttaaaggatgtgacagagaaagcatctgcaatggatgagggcagagagcaggctgtatactacagagatacggtaaagacagcgatggatgaactcagagcgccggtagataagctcgagatgttagttgataagtcaatgtggccgatgccgtcctatggagatttgattttcgaggtataactgctaccataaaccttctaaaaaaaaatcccccctaaagggagaaaaaactccccgaaaggggaggattgccaggtgacaaccgtcacctggcagattatgaaaaagttttgtgggtagtaacaaatactgataactatcatttgtatggttatagtatatggagcagaaatgaaaatttcatgtttacaggatgaaagatttttgaatcttaaatgaataaactgtgaacagcagagggatgggagcagcgctttcgctaaaactgaatataaaggaggagcttggcatgaaaaaactggaaattattattaagccggaaaaactggaagacttaaagggcgtgctggataccgaggaagtaaacggtttgaatatcgtcaacagcatgggctatggtaaccagaagggaattattaagaactaccgcggtgcagagtattccgtgaatctgcttccgaagatcaaagtcgagacggttgtggcagacgaagttgcaccgaagctgattgacaagatcgtagatgagattaacaccggacatttcggagatggtaagatcttcgtgtatgatgtcgaagatgcaatccgtattcgtacaggtgagcatggcacgaaagcattgtaagcctgtttaaggagtgctgttataggaggaattgaggagccttctataggagcgatgaaggagcactacagattattatgaaaaaatcaaatattgtaacatattatcaaaggggataatagagaacacaggaatgtctgtgatcgctgttatcctctttttttgcaggaggataagcttatggatatgagtgtatggttccttatgggaacagcgttagtcttttttatgcaatgtggattcgccatggtagaggcaggatttacgagagcaaagaacgtcggaaatatcacgatgaagaacctgatggatttctgtatcggaaccgtggcgttttatctgctcggttacaaccttttgtgcggcgatggaaaatttgtcggctggggactgaacccgtttacgaatttcggcgagaccgactggtcggcgtttgtgtttaacctggtattttgtgcaaccgctgcaacgattgtatccggtgccatggcagagagaacaaagttcattacctactgtatctacagttttatcatcagcttatgtgtgtacccgatcgaagctcactgggtatggggcggtacaccgtggctgaccgacatgggatttacagatttcgcgggctctgcctgcatccatatggttggcggtatcactgctttcatcggtgcggcaatgttgggaccgcgtattggaaaatatgacaagaacggcaagccgaagcctattctcggtcacaacctgttgatcggtgcccttggcgtatttattctctggttcggctggtacggcttcaacggcgcagcagcaaccgacaccatgcagctgtcacagatttttgcaaccacaacgattgcaccggcagttgcaaccgtaaccgcaatgctttatacctggatcagaaacggaaaaccggatgtgtccatgtccttaaacggttcgctggcaggtcttgtggcaatcacagccggatgtgcgaacgtagatgcaatcggagcttttattatcggagcaatcgcaggtgtgcttgtctgcgtggcagtatactttattgaggataaactgaaagtagatgatccggtcggtgcagtggcagtacacggctgcaacggtatctggggtaccctcgcggtaggattctttgattacaaggacggactgctctacggcggcggtgtacatcaccttgccatccagtgcctgggaatcctctgcatcgcaggatggacgatcattacaatgacaatcgtgtttgtggtattaaagaaaacgatcggtctcagagttaccgcagaggaggagatcgagggtctcgactcgacagagcacggattagagtccggctatccggatttcgtatccagagagttacactaatatgcactaatctaatttgattagattggtgaatctaatccccttagttagtatatacatcaacgcgggaacacccggcagattgccgggcgttttcgcgtttttggctgtaggatccataaattgtgattgtatagtaaatatgaagaaaaaatctgcgaaggcaattttgcggatggattatccacaggagaaagtggagaagaagtctattgaatagttatggacattccattataattcaagataagaaaataaacgaaaagtgttgtgggaaatatcagcagatatagggttggaaaataattttgggatctgtggaagaaataaaggcaaagacataggaggaatgtgatatgggacaggactatacaaagcataatctgctgttcatcagcaagtatcccgagatcattcatgaattttcagatgcgatgaaggatcgggatattgagattgagacggcgcagaacggcatagaggcggcggcaaagatcaagaaaaagaattacgacgtcgtgataacgggattatcccttgaggggtacaacggggagcagctcataacgtatctgaacaagacggcgcccagtacggtgtgtatcatctatacgaccacaatcagctcggcgcagcttcatttcttcatcaacgagcggaatgtattccgtgtattcttacgcccggtagacttccgtggagcattctgggaggcgcttgaggaggcgtatgaatatcatgccgtgcaggtgaaaaatgaggaggatacaggagcacggagacaggagcaggaaaagcaggagcgcgagattgagatcatggatcagcgcatgcgcagccagaggcagaccagagagacgacgaaccgttatatgaagcggctggcaggacttacgatcaaagaatacacgccgcaggcgctcagcgcggaagcgagagggcatctggagcatattgaggtgagaaccatcgatttttgcagtgagcagggagaacatgcagcggaatcgctggacaaggcggaggaggtactgcagacggtgagatcgtttacagagaattaagcgggacagataaaaagatgagcccgggttttgaaactctcaaaacccgggctcatcttttttattgactgccgtcggtgttgtcaccggtattttcggcagagccgccggtattgtcaccggtggtctgaccctcacccgtcgatgtgccgctgtcacccggggaggtgccgctgtctgtggttccggtattggtatcctgcgacgggatatctgttacacctggaactggtgtgtatggcgtcgactcatacggggtggacggtgcgttgtgcattgtacaggtgttggcaagagcctcctcggtcagaagataaggggcatcctctgtgttcgcggaaccgccgatcacgtatacgccggttgcgtaggtgttcggacaatttgcgccggcgagctgtccggaatccgcacagatattgaccagaatgtggtggtcacagtaatcggtcggtgccgtgccggttgcaaaatactcggtatatgccatattgccgcgcggatcgttcgtacatacgccgtcgatggcaagctttccggactctttgcagaccgtggcggtaacaatgccgtccggtttttcaaagtccgcataaggcagatcttcgtgaatccggctcatgaccgctttccagatcttcttcggataggtggtctgtccgctgttctgaaccgcattgtcgtcgtaaccgccccataccacgcaggtgtaataaggtgtgaatccggcgaacagggcatcacggttcttggtggtggtaccggattttccagcctgcgccatactgcttccgaagtaggccggcgtaccggttccctgtgtcataacgtccttcatggcgtcggtcagaagccatgcggtggtctcctttaagacggtgtgtgattccggtgccgtattgtcaagcagcacatttccgtcatgatccagaattcttgtatagaacttcggcttgatgtaggttccgctgttggagatggtagcgtaagcggcggtcagctccaagttggtgacaccgttggtgagacctccgagtgccagtgtctcgttgccgctctcgtcgatgccgacggtggtaaaaccgaagttgcggatgtaatcgtaaccaagggaaggtccgatctgcgccagcgtcttaaccgccacgacgttgatggaatcaatgataccttcgcgcagtgtggtgaaaccgcggtagcgcttgtcatagttattaaccgccccgccctgtccggaaccgtaattgtacggcgcatcatcctggacagcggcaagtgtgagacctcccgcgtccagtgcaggtgcataggcagcgataatcttaaaggtggaacccggctgtcttgtggtgtccgttgcacggtttaacgtcttgttggccgtcttgtcgccgcgtccgccgacgagcgccttgacttctccggtggactgatccatgacggtcaaggcagcctgcggctggacggtaaaggtaagcgtctcgctgccatccacaacgacgtcgccgtcctgcataagatccgccttatactgctcgatcgctgcgcgggcatcgtcctcgctgtcaaagttgatgctgtagttcttgtttgacttctgataataggaaagcatcgtctgctggctgtaattcgagatggtgccgtccggggactggatcgatacgcggtaggagaaggataccttcggatcggtcgggtagttctccagattgttgacctcttcatcacagatattctggatatccgggtcctgcgtggattcgatggtaagtccgccctgatagagagctttgtaagcctgcgtctccgtgtagcccagacggtcgatcatatcctgaacgatctgatccgtcatctcatctacgaaataggaattgatattctcatcctgcgactcgacattgacgacctgaatccggtcgtacacattgtccgccacggcctcatcgtactcgctctgcgagatatagccctggtcaagcatgttgttcaagactttctggcggcgctccttgttgtgatccgggtgtgtgatcgggttgtagtagctcgggctctgggtgattgcagcgagcacggcgcactcggagagtgtcagctccgagacatcttttccgaaatagcgctccgatgcgacgccgacgcccagcgtattctgaccaagattgatagcgtttaaataattttccagaatccagtccttgtccacaaccttttccagctggagcgccaggtactgttcctggaactttcgctcgaacttgtccgccatagactgttcgcttgtccactgggtaaacacggtatttttgagcagctgctgcgtgatggtacttgcgccctccgaaaaatgaaaaccggatgcgacgccttttaatcccgcacgcagaataccctgcagatcgataccgttgtgatcgtaaaaccgctcatcctcgatcgcaacaaaagcatgctgcagattgatcggaatctcgtcgatcgtcacgtatttacggttggaaccggatgcaacgagcgttgcggtctggttgccctggttgtctaacacggtcgtaaggtatccggtcggggttgcatcaatatcttcgattgacggagcggaagcaataattccggagatcactccgaacgcggagcatccgccgacaatcacgactgcaaaaaagcatataagcaatgccttacaaaaaattacgttgaattttttgcgaatcatggtacccttggaagcaagctcatgctcgcgcttccgagtacgtttctttccataattcatagtaggcctccttttctaattcaccatcaatgtattataccaaagaactgtgtcagaataaagaaaaaactgaaaatacggacattcttcacagtttcttaaggattcgtattgcaaaaaagaaaggtgccgtgttactatttgaaaagattaaaaagcgaagggaaaggacccgggtggcgggattgtggatcatatgaagacagtgtatatcggcggcgagggtgagattgtagaaaagaagtccagatttatagcgacggtccggccggttgcctcggaggaggaggcagtggcattcatcgcggagatgaagaaaaaatactgggacgccagacacaactgttctgcatttgtgatcggagaccggcaggagatcagccgttgctcggatgacggtgaaccggcgcagacggcgggcagaccaatgctcgacgtgctgctgcgggaggagattcacaatgcagcggtcgtggtcacgcggtatttcggaggcgtgctgctcggcaccggcggtctggtgcgggcgtatcagggagccgtgcaggcggggcttgcggcgagtaccattatagataagaaggaaggcatacatcttgcgatcggcacggactataccgggcttggaaagctgcaatatctgatcgcgcagcagaatctcacgctgatcgacactgtgtatacagaaaaagtggaacttcagcttatggttccggcagaacagcagcaggaagtcgaaaaagaaatcgtggaggcgacgaacggaagcgcccggatttcctggggcgagaaggtgttgtacgcactcatagacaaaaaaatcgaaatttttgaaaaaaacacttgattttttctgccgacctgttataatagcttttgttgacagcacttagggctatcgccaaatggtaaggcaacggactctgactccgtcatttcaaggttcgaatccttgtagccctgcttctaagacctcatgaacgatgttcatgaggtcttttctatatcctgcatctgcttcctatcattgaaaaacccgtccccctgtgttactattactacgataataacagacacaggcattgaaagaagggactccatgtatcagtttgaaagtcgcgtacgttacagtgaagtggacagcgaacggcatttgacactgccggcggtgatggattatctgcaggattgctgcacgttccagtcagaagatatggacatcggcgtggaatatctggcagagcagaagcaggcgtgggtattgtcttcctgggagattaaggtcagacgctacccggttatgggagagaaaatctgcgtggagacatggccgtacgcatttaaaggattttatggataccgcaacttccggatcacaaacggacagggagaggaactggtgctggcgaattctgtctgggtatacatggatatggagcggatgcgcccgatgcgtatcccggagaaagtggcagatgcctaccggccggagatcggagaagaactgccgggcgagtggggcgcgagaaagctttcggttccggagggcgggactgcgatgcagccggttccggtggcgggattttttattgacaccaaccaccacatgaacaacgggaaatacattctggtggcaaaggaatctgtgccggagaattttgtgattggcggtgtgcgggcagagtaccgccgggcggcaatgctgggagatgtgctgcatccggttgtagcggtggcagaggaaaagataacggtggttctgacagacggtgaagaccagatttatgcgatcgtggaatttgcggcggcagagaagaattgatggaaaatgaggatcgagatgaaattaggcgaatatcagaagttaaaagtaatcaaaaaagtagaatttggaatttatctggcggagcatgagggagacgagacgcgcgtgctcctgccgcagaagcaggtgccggcggacgcaaagctcggggatgagatcgaagtattcctgtacaaggattccaaggaccgcatcattgcgacgaccaatcagccgaaactaacgcttggcggactggcggtgcttgaggttgccgaggttggaaaaatcggcgcgtttctcgactggggactggaaaaagacctgtttcttccatataaagagatgacgaaaaaggtgcagccgggggatgaggttctggtgacgctctacatcgataagagccgcagactctgtgcaagcatgaaaaagctgtacgatctgatgcgcacggattctccttataaaaagggagacacggtaaacggacggatctacgagttcggtcatgatttcggcacgtttgtggcagtggatgactgctactcggcaatgataccggcacatgaggactgcagccatcttcagatcggcgatgtgatcgaggcgaaagtcaccggggtgaagccggacggcaagcttgacattacgatgcgggaaaaggcatatctgcagatggatgcggatgccgagaaggtcatggaagtgattgaggaatttgcgggcgtgctgccgtttacggacaaggcttctccggaagtcatcatgcgtgagacggggctgagcaaaaacgcattcaagcgtgcggtcggcagactgtacaaggagcgccgcatcgagattacggagcgcgcaatccgcaaattatagtagcatggatgttccatgtgtgctatgatagacgaaaccgacagactataagaaagaaggaatacagcatgaaaaatgtaatcagcacggacaaggcaccggcagcgatcggaccatattcccaggcgattgaggtaaacggcatggtatacacttccggtattattccggttgtaccggcaacaggcgagatcccggagggatctgtggcgcaggcagagcaggcgctgacgaacctgtcccatctgcttgaggcagcaggcaccagcatggcgaacgtggtaaaaacaaccgtatttattaaggaaatgaatgatttcgcagcgatcaacgaagtatatgcgacattttttgagggcgcgtacccggcgagaagctgcgttgaggtggcgcgtcttccgaaggacgttatgctcgagatcgaagcgattgctaccaaataattgctgcgacaggaacaggaatacctgagactgccggaggagatccggaacataaaaagacgcggcacactgttacatcgtgtgccgcgtcttttcttttcagagagcatctgttacatgatccctatacgtacatatcgatattgccgccgagctccgggttcaccgaatgttccatcatctgaatcatggaggcgcccatctgctgggtcaggtctaatgactgactgagaacggccgtgccgactgcataggcgagactgccggagctgacagaagaaccggagtcgtaggccgtcagtgtgccaagcgccagatcaacattggaaaaatccatacgaatcccacctttccttcttatgatagctttattatgccacagatggaggagaatggcaattatgaaaaatgcaacaaactataaaaccggaaaggcataaggcagcagcaggaagggaaaatctgggagcatatgtaacccggatttgtcggaaaatggcgcagattgtggaaaagacgtgtcgaaaaagaaaatattgtgtaaaatctgcggagtattacaaaatatagcgggttgacatcatatagacgctttgttataataaccatgtaataaatgtaacaaatttgtaataaatccgttggaggcattcatgaacagaagaacactgagagctacagggattgtattgactggaatgttattggcaggagatcctgtatctatgatatatgcagcaccggttgcgggtgtgtccgttgctaccacagcagaagcagtggcagtcggaacgggaagcagtagcccgagcgcaggcgtttcgcttgcagtggcagattgtctggtcgcaagcaatgaggaagtggcgcaggaagcagcagcgcagcaggaacaggtaagcgagaatgagacaccggtggtagagtccgaatatgcagacattgccattgcgcaggtagataactatgtaaacgtgcgtaccgagccgaacacagagagcgaggtagtcggtaagctttacaataattcagcggcaacgattttacagaccacagaggatggctggtatgagatcacatccggcaatgttaccggctatgtgaagtgtgagtacgtggttgccggagatgaggagcttgcaaagtctgtaagtacccgctatgcaaaagttacgacgacaacgctttatgtgcgtacagagccgtccacagatgcagcggttttaaccatggttccgattgaggatgacctcgtggtaacagacgagtctattcctggctgggcacttgtgacgacagaagagggagacggctatgtatccaccgattatgtcacattgacgacagagtatgtgcaggcggagtccaaagcagaagaggaagcacgtcttgcgaaggaagaggcagagcgtgaggcggcggcagcagcggcagccagcgccagaaagaagaactctgagagttcatccagttcatccagctcctcagattccagtgcatcctacagtgcaccgaccagttcaaacggtcaggcagttgcaagctatgcatgtcagtttgtcggtaatccgtatgtatatggcggaagcagccttacgaatggaacggactgttccggatttgttatgagtgtgtattcagcatttggaattggtcttccgcattcatccagtgcgttgagaggctgtggttatgaagtaagcctttcatctgcacagccgggtgacattgtatgttacagcggacatgttggaatctatatcggaaatggaacgatcgtgcatgccagcacaccgtccagcggtatcacttactccaatgttacctaccgcagcccgatctgtgtaagaagaattttctaaacgagaatataaaatgggactatcacttgtgatagtcccatttttgcgtcataagaagaggaagagaagaggaagctcttttgattttcagctacattctgcctgataacgaagggacatgattttctcaatattgcaccccaaaacgcaggattattgcaaaaaatgaaggaataggacaaaaggcacagtctatacaatgtgcacaaattgtaaaaaatgaaaaaggaaaactgactaaatgagtgtgaattgcaaaaaagttatccacaatgcagaaacggaaaaacaggaaaaatcgagttatacacgaagttattcacattatccacagaaaagtgggaaaaaaatctggtttacatagtaaaataatcgaatgtctgttttgtgaagaaataataaagttgtccgatttcgtggaaagtttggaaaagttattgacatttcaaatataaaataattataaaaaagcagtaaaagaagtctgtaaatttgaccggaatggaagaatcttgaaatacgaatacaagtttgctatactaaaaacatatctttcgcagacgaaggtatgttttttcaaataatggtaatgatataggtgcacaatgattaaaaaaatagatattatggggatcggtcttgacaactataccgtgcgggaatcgatgcggcaggtcgagaactatctgagtaatgatgttttaaatacaatcgaaaacatttccatgcagatgctgattgcgtcagagacggacccggtgctacacaacgtgatctcggagctagatctttccgtcattggggagaaggagatcttaaaggcggcggatgcggacagcatgcagcgcgtgcaggagacggagcagaatgatttttcatatgaattctatcggaggatcgagcgcaataagcggagcatttttgtgctgggacagacggaggagggcgtgcagaaggtcaaagcggaactgcaggaagcattcccgaagctgattctggcgggagaatatgcactggaaaattgtgtggggaatctggatgccgtcatcaatgagatgaatgcgacgacgccggatgtgatcgtttcgattctgccgtctccgctgcaggaacattttttcgcggagcataaggataagatgagcgcgaccatatggttcggcatgggagaactcggcgttcatggaaaaaagcatggacttggaagtttcgttaagaaccggctgcatctgggaagattgaagaacagtatgaacaagtatcaggatcaggaaaagtccggggaagcggagtgaaaaagaggaaatgcataaaaaaaatgcatttcctctttctttttttgctgttttgcattaaaatatagcttagatatttttgttccgaggtagaaaggcggcttttttattgtgaaagttgctcatagggaagaaacacagtgaccggacagaagagtttcagcagaagcaggatgagaaggagcggagcttatgatttcaaatcaaatacttcagaatacaatcgatggattaaagggaatcaccagaatagatctgtgcattattgatgtggagggaaaggtgttagcagccacttttccggaggcggatcagtacattgagccggcgcaggcgttcgtggagtcaccggcagacagccaggtggtgaacggatatcagtttttcaaggtatttgatgagcaccagcttgagtatattcttctggcaagcggagacagcgatgatgtatacatggtgggaaagattgccagtttccagatccagaatcttctggtagcatataaggagcggttcgataaggataattttatcaagaacctgctgctcgacaacctgttgctggttgatatttataaccgtgccaagaagcttcacatcgacaccgaggtgcgccgcgtggtattcattgtggagacgaaccgcgacaaggacggcaatgaactggagaagatccgcggaatcttcggcacgaagacgaaggattttgtcacagcagtcgacgagaagaatattatcgttgtgaaggaagtcggcgagaacgaaggttacgaggagctgaacaagatcgcggagagcatggtcaacctgttccgtgcggatgcggacagcgacgttcatgtggcatacggaacgattgtcggcgagatcaaagaggtatccagatcctacaaggaggcgcggatggcacttgatgtcggcaagatcttcttcgaggagaaggatgtaatcgcttactccacactcggtatcggtcgtctgatctaccagctgccgattccgctgtgcaagatgttcatcaaggagatttttgacaataagtccccggatgatttcgatgaggagacgctgacgacgatcaacaagttctttgagaacagcctgaacgtatcagagacttccagacagctttacatccaccgcaacacgttagtgtaccgtctggataagctgcagaagagcaccggactggatctgcgtgtgttcgaggatgccatcacgttcaagatcgcactgatggtcgtaaaatatatgaagtatatggagtctctggactactaattcttaaaatttgcatacgggtattgcaacaactgcatacattgagtagactatatgggatgggacagagcatttgattctccggaaccatcggagatgcatacagaaatgaggtaatttcatgataaagttagagcatgtcagcaagtcgtactctgcgggaattcctgcacttaatgacgtgagtcttaacattgaggagggagagtttgtatttgttgtcggtgacagcggttcgggcaagtcgacgctgatcaagctcctgttgaaggaactggaaccgacggagggaaccattacaatcaatggcagaaaattaaataaaatcagacgaagacaaatcccgaaattccgccgcaacattggggtggtttttcaggatttccgattgttaaaggatagaaatatttatgacaatgtagcctttgcacaaaaggtcattggcgaatccaaccgctccatcaagaaaaatgttccaaaactgttgtcgatggtgggactggcggcaaaataccgctcatacccgagacagctttccggaggggagcagcagcgtgtggcgattgcgcgcgcgctgattaacaagccgaagattctgctggcggacgagcctaccggtaatctcgatgcgaataatgcatgggagattatgaagctgatggaggagattaacgagcaggggacaacggtggttgtagtaacacacaatctggagattgtgaaagcgatgaataagcgtgtcatcacgatgcaaaaaggcgttgtggtagacgataccgcttcggatcattacggtaaggatacctctgtcgaacaggacgatgatctgtttgatgatttcttggatgatggaggtgacgacgactatgcgaattagtacgtttttttatacaattaagcagggaatcgtgaatatctggaagaacaagctgttctcactggtgtcgatcgccacgatgacagcgtgcatttttctgttcggtctgttctatatgattgtcgtgaacttccagtccatggtgaagaatgcggagtccggcgtggcagtgacagtgctgtttgatgagggaatctcggatcagcggatcgaggagatcggggagctgatttcggagagaccggaagtatcacattatgactttatctcagcggatgaagcatgggaaagcttcaaggaagtttactttgagggaaatgaagcggcggctgcaagttttgccggcgataacccgctggcgaattccgcgagctatgccatttacatgaacgatatatcgatgcaggactcgctggttacctacctgaagtccgtcgatggagtgcgtgaagtaaagcagtcccagcaggtggccaacacgctgaccgactttaacagtctgatcgggtacatctcggcgggcgtcatcttgattctgctcggtgttgccgtctttttgatcagcaatacgatcacggtcggtatctccgtccgcaaggaagagattgcgatcatgaagctgatcggagcgacggattattttgtgcgcgcaccgtttgtggtcgaaggtattgtaatcggactgatcggagcggcaattccgcttggcattttgtacgcattgtacgggaagattgtaatgtacatcagcgataagttcagctttatcagcaatatgatgaagttccttagcgtgaacgagattttccataatctgatcccggtggcattgattctgggtgtgggaatcggttttatcggaagtcgcatcacaattcgcaagcatttgagggtataatgataagatgccatacaggaaacacatgaagtttacaatgatacgaagaatagcagcgctcggactgattctggtgctggcggcgggcataccgatccaggcatcgtcggcttccacagagaaagtgacggaggacgccgcttccacaaaatccctgcaggaggcgcaggacgagaaagcccagctggaaaaagcgctcaaagaggcgcagagcacgattgaggatctcagggattccaagggtgatatcgagagcaaggtaacagaattgaaccagcagctgatagatatatccgcgcggatcacggatcttgagaatcagttgacggcaaagagcgaggatatccaggagacgaaggacgagcttgccggagccaaagagagggaagcccagcagtacgcggatatgaaagtgcggatccagttcatgtatgagaacgggcagacctcttatctggaggcgcttttatcttccagaaacatttctgaatttttaaattccgcagattatatcgcacagatacagagctatgacagacaaaagcttaccgagtaccaggacaccgtggagtcgattgtgaatctggaagcccagctggagcaggagtataccgatctggaggcactcaagtcgacggtcgagagcaataaagcgactgttgccgctatgatgcggcagaaggagtcggagcttgcggacatctcgggagatattgaagatgcgcagagcgacgccgactattatgcggcggagattcaggcgcaggaagaactgattgcggcgatcaagagagcggaagcggagaaagcggcagccggggtggaggaacatccgtataccggaggagcgttccggtggccgtgcccgagcagcacacgggtgaccagcgattatggaacgagagtatccccgatgtcgggagcgtcgtcgaaccataagggaattgatatcggagcatcggcgggagcggacattatcgcggcggcggatggaacggtaacagcggcatcctacagcagtgcggcgggcaattatgtgatgatcgaccacggcggaggactctacaccgtctacatgcacgcatcatccctgctggtatcgcccggacagaccgtgtcggcgggagatgtgatcgcaaaagtcggaagtaccggcatttcaaccggaagccatctgcatttcggcgtctctttaaatggaagttacgtcagcccgtggagttacctgggcggctgatggagaaagtacacgtaggcattgaccgaaattccctgtccttggacagggaatttttacatatcttattacggatagcatacagaaatgagggaaactatggacgaacaaagagaaaatatgcaaaacggcatgatagaaaatgagacaaccggagagcagaagccggacggcggaaaagagcgcagacgccgtggaatgggagccggcatccttcttggaatctgcggaacactggtcgtcggagcgcttggcatttatctgacctgccgctttaccggaagtcagatactcatcaccaatgcagcggcagatacggacggaacgaccctgctggatgcaaagacaacggcaaagatcaacgaactgtcagcttacattgatctgtattattatgaagataccgatgttcaggatttgaaggacggtctgtatgcgggactgctggagggactggatgacagatattcggtttactacacggcggatgagtacgcgcagacgcaggtcagcatgacgggtcagtattacggaatcggggcagggcttgcgcaggataaagataccatgcaggtcacaatcacaaaggtttacgagggaacaccgtctgagagtgcgggacttcgcaacgaagacgtaattctgtcggtggacggaaccgaggcggatacgatggatgtcacggatctcgtgaagctgatccgcggggaagccgggacgacggtacatcttgagatctaccgcccgtctaccggagagaatctctcgtttgacgtggagcgtgccgatgtgacgctgccgagcgtatcttcacagatgttaaacgatacgatcggttatatccggattgaatcttttgagaaggatacggcaaaccagtttgagaaggcgcttgcggaactggaaggggaagggcttacatcgctggtggtcgaccttcgctataacggcggcggacttgtcgattccgtggtacagattcttgacgatattctgccggaaggcctgatcgtctacacggaggataagaatggacaccgcgaggagtaccgttccagcggagacacgcattttgactatccgatggcggtgttaatcaatcaggacagcgccagcgcttccgagatttttgcaggagccatcaaggattacaactacggaacgctgatcggaacgacgacattcggcaagggcatcgtgcagagcctgttcccgttggaagacggagacgccatcaagctgacaaccgcgaaatattttacgccgaacggcaactatatccacggtgtcggaatcgatccggacattgaactggaatatgagtatctcgacccggacggagagcagtatgagatccagtacgataatcaggtgcagaaggcaatcgaagtgctgagtgagaagacacagaacgactgatcggagtgaggagacgggatgaagcttcggatataccgtgtgataacaggaggacttctgcttctttgtatggtgatgattttccggttttcggcacagccggcatcagaatcggagcaggtcagcggtggggttgcctaccgcattgtggaaacatggagtcatctgacagaaacagaatatacacagagcgagatggaagcatatgccgaccggattgattatccggtgcgcaagctggcgcatatgacagaatatggaatactctgtctgctggcgtgcgcttttgtgcacggatattccggtaactggaaagtgtgcgggatttcggcggctgcgatcgcggcgctatatgcggcaaccgatgagatccaccagctgtttgtcccggggcgcgctggacggttcctggatgtgtgtattgatacgctgggagcggtgatctggctgctgttttttacagcactgcgaaaattgtgggaaaagattgcgaaaagacggggcttccagtacaataagaatagaaaaaaatgaaagaggtgataactgtggtagaacttgatcaatttaaagtgaccctgaacgcatacagggaaccgctgcaggaagtgagggattcactttgacctggtaaacaaagaacagcggatccaggagttagagagggagatggaagcagcggatttctggaatgatccggaggcctcccagaaaaaaatgaaagagttaaagagcatgaaggacgatgttgccacatatgcttctttgacgacacagtttgaagatattgagacactgatcgagatgggatatgaggagaatgacgccacgctgatcccggagatcgaagaaatgctgacggagtttacgacgacgtacgatgccatccgcgcaaagacgcttctgtccggcgagtacgatggggacaatgccattgtgtcgcttcatgcgggcgcgggcggtacggagtcctgtgactgggcggcaatgctttaccgcatgtatacacgctgggcagatgacaagggatacagcgtggaagtgctggactccctggacggagaggaagcaggcatcaagtccgtgacattccaggtaaatggagaaaatgcctacggctatctgaaatcagaaaaaggtgtgcaccgtctggtgcgcatctcaccgttcaatgcagcgggaaagagacagacctcttttgtgtcctgcgatgtcatgccggatattgaggaagatctggatgtggagattaatgacgatgatcttcggatcgatacgtaccgctccagcggtgcgggcggacagcatatcaataagacgtcttccgcgatccgtatcacgcatcttccgaccggtattgtggtacagtgccagaatgagcgttcccagttccagaacaaggacaaagcgatgcagatgttaaaggcaaagctgtacctgttaaagcagcaggagaatgccgagaaggcggcgggaatccgcggcgaagtgacggagatcgggtggggcaaccagatccgctcctatgtcatgcagccgtatacgatggtgaaggatcaccgcaccggtgtggagaccggtaatgtggacagcgtgctggacggaaagctggatatctttatgaatggatatctgaagtggctctccctcggctgcccgaagggacttggaggagacgatgagcagtgatgtgatccgcaccttaaagtgggtgtttggaaaaggcggtctgattgaggaatataagcgtcaggaacagatgttggaggagacaccgaagtcggtcgcttccatgacgcggatttttgcaccccagatttcccgtgattttccgggaatgaatctggagcagtttgaggcgctcgcacagcagcagcttgtggcggcgcttcaggcagtgtcggcggggaatctggaaagcgtcgcgcgcgcttccgatgaactgaaggagcaggtcagccgtcagattgagggaaaccgtgcggcaggagtgcgtgagacctatgagcagatccgcattcatcagacagagatttccaattacgaaaaaaagaacggcacctgtgtgattacatttcagagtgcggtagagcattaccactacaaggaaaaagcgggcaaaattatctggggatacaaagaccggaagctgcagacaaagtacaatatggagctgctctatgtacaggatgcggcgcagcagacggagggaaatgccttcgggctgaactgcccgaactgcggggcgccgatgaagggacttggacagcagatctgtgaatactgcggcagcccggttgtaccggtagacaccagagtctggcggatggtacgtttttctgaggtggattatcaccatgtgtgaatacatttttggcgcatgattctgtgcatatgaagttttgcaggaacttccaataagaactcgtcagagtacaacgaaagaatagaacaggaggaattgttatgggaattatcaaggcaatcggtagtgcgatcagcggaggactggcggatcagtggctcgaggtgttcgaggcggatgatatgggggaacagaccgtctttacgagtggtgtgctgatccggagaggacagaataccaaggggacgaacaatacggtgagcaatggctccgtgattcacgtgtatgacaaccagtttatgatgcttgtggatggaggaaaagtagtcgattacacggcagaaccgggatattataaggtagataattcttccctgccgtccatgctaaacggtgaactgggagaatctgtaaaagagacgttcaaccgtatcaagtacggcggacagacgccgacggcacagaaagtatatttcctgaatctgcaggagatcaaagggatcaagttcggaacgagaaacccgatcaattactttgataatttttataacgcagagcttttcctgcgcgcacacggtaattattccatcaagatcacgaatccgctgcagttctatgcggaagtgatcccgcggaacaaagaccgtgtcaattacgatgagatcggcgagcagtacctgtcagagtttttagaggcactgcagtcggcgatcaaccagatgtcggcggacggaacacgtatttcctatgtgacttccaaggcgatggaactgggcaagtacatgcaggacattctggatgctgattggaaccagatgcgcggtatggagatccagaaggtcggtatcgcgggcatttcctatgacgaagagtcccagaagctgatcaacatgcgcaatgagggcgcaatgctcggaagcgatttcaacgtcatgcgcggtatggcggtcaagaatattacggagggtgtgcgtgacgccggaagcaatgcgaacggtgccatggcaggctttatgggagttggcatgggaatgaatgccatgaaccagacgctgtctggactcggcgcgatgcagacaccggcagacatgcaggcaaatgcaggaatgcagcagggcagcgcggcaccggcaggacagatgccagcggcaggcgcagtgccggcaggacagacaccgggggcaggtacccaggtgggctggacatgtgagtgcggtcatgtgaacaccggaaagttctgcagcgagtgcggaaaaccgatgccggtatctgacgaatggacgtgtgagtgcggccatgtgaacaccggaaagttctgcagcgagtgtggaaaaccaaagccagtatccggtgagtggacgtgcgagtgcggacagacgaacaccggaaaattctgcagcaactgtgggaaagcgaggaactagcgatggcaattatcagttttaagtgtccaaactgtggcggagaactgatttttgacccggcgacacagaagtataagtgtgaatactgcaattcgctgttcacgcaggaagaactggatgcgatgaagccgatgcagggcggggagccggacgctgtggcacaggagcaggcaggcggagaacgggcagatgagacggaagcggcggagcaggcagccggagagcgggaaagcgaaccggagggcgaggcggtgtattacagctgtccgtcctgcggcgcagagattgtgacggatgcgacgactgcggcaaccttctgctattactgccataatccggttgtgctcggaaagcggctggaaggtacctatctgccgaacaagatcattccgttcgagatcagcagagaggaagccgagaagaagttcctggattttgtcggcaagaagaaatatgtgccgaaagcattttttgacaaaaagcagattgagagcatgacaggcgtctatttcccatactgggtctacgacgtggagctggagggaaagatgcagggagacgcgagaagtgtgcgcatgtggacgacgggcaatacccagtacacggagaccaaatattatgcggtggagcgcgagggcaatgtgtcgcttcgcaatctgacggagaacgcgttgaagaaggcgaatgtaaagcttaccagcggtgtgatgccgtacgcctatgacaagatgaaagattttcacatgggatacctctccggattccttgcggagcgcagagatattgagcagaatgctgtgcagggcaagatgcagcacaccatgcgtgagagcgctgaaaagctgatgcgcgataccatcagcggttacaacagcgtatcggtcaagaatacgttttttgcaccgaagaaggaaatctggtcgtatgtgctgctcccggtatggacgattacatataagggcagagacggaaaagtatactactattccatgaacggacagaatggaaatatctgcggtgatctgccggttgaccgcccgagacttgcgctcaccagtctgttgatagcgcttggcattctggtattcggactgttaggagggtatttcttatggtagagaagatgaaaaaatcgctcctgtggtgtctggtatgcctggtgtgtcttgttccgtgcagcggtgcggcactggcggcggaggcggacgcggcgcaggatgcagcggatggttatgtgtacgatgaggcgggacttcttacggcagatgagatcgcggacttaaacgatgagatcgcctcgtttatggaagaatccggctggaatgtctatgcggtcacgacagatgatgcacaggggaaaagtgcgaccgcatacgcggatgatttctttgacgaacattcgccggataaggaagacggtgtggcattactgattgatatggataaccgcgagatcacgatctccacctgcggtatcgcgatccgttatttgacggattcgagaattgacgatatcctggatgccgcgtacgcgaagatcagcaatggcgattacaatggctgtatgcattccatgctgaccggtgtggagaattactatgaaaaagggatttcagagggacagtacaattatgactccgagacggggaagatttccagataccatgttctgacgcttggggagatcttcggcgtgctggcggtcgccatcggagccggctgcatcatttattttacgatcagcaacagttacaaggtgcgcggaaagggatattattacgcttaccagcagaattccaaggtcaatctgcgcgtcaaggaagatcgtctggtgaatcagacgacgacgcatcacaggatctcaacgagcagcggcagcagtggaggacattcctcctcgcacagcggaagaagcacgacgcacacgagcagcagcggcagatcacacggcggaggaagccgcaagttttaaagggagaatagcttccataactaaattttattacggatattcacaaaagaggttgcctgtgcagcctctttgtgttattatcttcctcatgaggacaagtgtcagcgtgctgcacacattgcactcgtgagggataccagaagaaagaggattatgaggaacatgaaagagaaaggtcagtattatgtattaaaggaaaaggcggtgccggatgtactgcttcgtgtcgtggaggcaaagcggctgctggattcggggaagacggattctgtgcaggatgcgacagagcaggtcgggatcagccggagttctttctataaatacaaggatgatatttttccgtttcatgagacggcgaaggggaagacaatcaccatggtcatccagctggacgatgagccggggctgctgtcgattgtgctcaagacggtggcagagtttcacgccaatatcctgacgatccaccagagtattccgatcaacgggatcgcatcgctgacactctcggtcgatgttttgccggagacgggagatgtgacacagatggtggcgcgcattgaggagcagacagggatacattatgtgaagatcctcggaagagagtaggaacagaataggatagaagacgaaagtggaggcagtatgatcaaagtagcagtaatgggatatggaaccatcggttccggcgtagtggaagtattagacatcaataagaacagcattgcaaagcgtgccggagaagagattggtgtgaaatatattctggacttaagagattttccgggggatccgattcaggaaaaggtggtacatgattataaggtgatcgcaaatgacccggaagtgcagatcgtcgttgagacgatgggcggtgtggagccggcgtacacgttcgtaaaggcaatgcttaccgaaggaaaacatgtgacgacctccaacaaggcgctcgttgcggcaaagggtgcggagctgattgcactcgccaaggagaaaaatgtcaatttcatgtttgaggcgagcgtcggcggcggtatcccgattatccggccgctcaattcctgtctgacggcagatgagatcgaggagatcaccggaattgtgaacggaaccacgaactacatgctgacgaaaatgaccgaggagggatcggagttcgacgatgtgttaaaggatgcgcaggcgaagggttatgcggagaaagacccgaccgctgacattgaaggatacgatgcctgccgcaagatcgccatcctgacatccctggtatgcggacagcaggtggactttgaggatattcacacagagggtattacgaagatcacagcgaccgatatccggtatgcgaagacaatgggcagagccatcaagcttctggcatccagccacaaggtgggagatggatatgtggcgatggtagcgccgttccttttgccggcgacacacccgctttacaatgtcaatgatgtgttcaatgccatctttgtacacggcaatgtgctcggcgatgccatgttttacggaagcggcgccggcaagctcccgacggcgagcgcggttgtggcggatatcgtggatatggcgaagcatctggacaccaatatcgcggtggagtggagctctaagaaactggagctggtggattaccgcaacgtcgagaactgctattttgtgcgcacgtccgcagatgagaagcgcatagaagaagtcttcggtgaagtgagttatgtaacggcggaaggcgtatccggagagaccggatttgtgacggcgcgcatgagcgaagctgattatgagaaaaaggcggcggagcttggcagtgtacttcagatgatccgcgtgacacagtaaaacaggggacccgatgtgatgcagcaggctgataacagcagaaagagaagtgtgagatgaagtatttggtaattcttggggatggcatggcagaccgcccgatcgagagcctgggcggcaggactccgttagagtatgcaaagacaccgaagatggatgaactggcagcgaaaggtgagatcggcatggtacatacgatcccggacggcatgaagccgggcagcgatactgccaatctctccgtgctgggatacaacccgagagaattttattcggggcgctctccgcttgaggcgctttccatcggcgttccgatgaaagacacggatgtggctctgcgctgcaacatcgtcacgctttccgaggaggaggacaattacgaggaccgcacgatcatcgaccacagttcgggtgagatcagtaccgaggaatgtgcagtgctcttggaggcggtgaagaaggagctggagacagacatttttcacttttatgtgggcacaagctaccgccactgtctgatctgggagaacggcgaggtggtggatctggtgcagccgcacgatgtgctgggacagaagatcggagacaagcttccggagaacgaagcgcttcgcaccatgatgaagaaaagttatgacattctggtgaatcatccgatcaacatcgagcgtaagaaaaagggattaaatcctgcgaactcctgctggttctggggcgcaggcacaaagccggcactttatccgtttacggagcgcacccacaaaaagggcgcgatgatttccgcagtcgatcttctgaagggaattgcggtcggcacttccatgaaagtcatcacagtggacggagcgaacggcggtctggatacgaattatgagggaaaggcaaaagcagcgctggacgttctgaccagggatggatatgactttgtctacgtgcatctggaaggatcggatgagatgggacaccagggcagcgttgagaagaaggtaaaggcgatcgagcgcctggatgagcgcattatccggccgatcgccgagggacttgcggcggcaggagaggatttccgcatggtggtgcttccggatcatccgacaccgatttccctgcgcacacacacggcggacaatgtgccgtatctgctctatgacagcacggcagagcgcagtgagagctggcattacaatgagcgcgaggcggcgcagacagccaactttataccggaaggacataagctgatcgaatatttgctgcagatgtaagaaaagtccatcttcctattcagggtaggaaggtggatttttttgtgtcatagcaaacttcgtttctatgacacaaaaacgtgccgggcgggatgcacaaaatactattgacagcctgcaggaagagtgttatatttgttatagattaaacggttaagcaaactgcagaatacagcggtttgcttaaaaaatacacgaaaacttaaccggttaatcatcagaaacaacaagaaaattgattagaaaggttggagggaaaaatgagaagaagaaatgatggggcggcggtggcaatgaccgcaatgctggtaagcgggatgctgctgttatccgcatgtggaagtgcggatgcggtgaagacggatgcgatcggggcaacggaagagatggcgcagaccgggcaggcggcagcctgcgttgtgacctattacgactcggatggcaagaccgtgctgcagacggaggaggtagaaaaaggggcatgcgccaaagagtatacgccagagaaggacggaagcatttttgtcggctggtttgcgacaccgcagatgagccacaaatttgatttttcacaggcggtaacagaagacacctcggtgtttgccggatttgtgacgtatgtggaggataccagagagtttgcgattgtgggaagcggcacgtcgccggtacttctggaatcaaactggggagcagtcatcggggatgcgcagaagatgacgaaggaggagagcgacagcgagaatgtgtatacgatcacgctcgatttaagcgagggagaccagttccagtttgccatggattcctcctggggagatcagcgcggctacgggtatctcgatacgattgaactggacggcatggattattttgaaaattccggaagccttggcgacaccggcgtgaaacactccaatatcaagtgtgcggtggcgggaaattatacgtttacactgacgacgtatccgggagaggatacctacgagaccgacaatgcaaactatacggaggagaacagggaagcattcaacatcaacccgtacgatacgatcacgtggacatacaacggagcatcggagaatgccggcggagatgttcagacagattattacatcaagggtgcgattgtgaccggatgggaagatgtgtattcggatgagacgaagtttaccgagcaggatggcacatacactttaaagattgatctgacggagggagatgaattcatgttcacctccatggtgaccgtcggggataccagcagcgcaggaaccgaatatatccgctacacaaacattggcggcggggatgatgccagtctttcccatgtgacggaaggcggcggggagaatctgatcgcagcggagagcggtacctatgtgttcacgtatgatcccgcagagcaggtattgacggtggacgtggaataaaacagctttatgacactgcaatggcgtgctgctgcagcggctcacggcgcagtgcgctgttcatgcagtcaaataatacctggaacttacgtgcagagaaagatggcaggtagcagacatttgcggtggacgccagcagctcgtacagcgtgtgatccgtcacgagcaggttccggccggaaaacggtgccagttccgaaggggagtttacataatgtacttccggaaacatgtctgcggcgtaagatttcttcccggcgtttgacgtgtcgagagagaggaaacaatagggctcgccggaaaagaacgtgtgcgctccggttgccatctgtgcataatcggaatagatttcaaaaaacaggggatcgccgatccggcagtccaaggcaagaagcggactgaaattgttgtcgccgatctgatgaaaatattcttcggaaatgtcgtaggccacgatcgcgtcagcagcatcgtatttttccgtgtatgtgcggctgagatagatgagatcataatcctgcgcatgcagaaaggtggagaaacattccagcagatacatctgctccgcgcgcttaagagccgggacatcagtgtcaagatagagtgcgaccatccggttgcggcttgtcgccagtgccttggcggactggttgggagtgtagtctaaaaggttgataacctgaagaacttttttgcgggttgcgtcgctgatacgcatgtcggtgcggttgttgatcacgtatgaaacggtggcaaccgatacgccggcttcgcgggcaacgtcccggatcgtgattttctgactcaagataatgtccttccctgtaatgagcaattctatgttccatttatatagaatttgcccggatttgtcaataggggaatcgggaagaagagaatgaagggatagagaataaagaggaaagaggaaagagcaatgaatgagagtgcaattttacacataccggattcccagtactgttttgcagtcggagagaaaaaactggtgatcagactccggatggcgaaggaagacgcggacgcgtcggtaacgttaatctatgcgggcaagtatcagtttcagcaaagcagagagcagattccgatggagatacgttatacggatcggctttatcattactatgagacgaccctcgtgctcacggacgtaaggctggcatacgtattttgtatccggcagcagggcacgacgtattacttctgcgaggacggcgtcgtcttacaatatgatttcgcggagggattttacaatttcttccagatgccgtacatcaaccgcaatgacgtactgccgacggtaaaatggatgaagagcgcggtgttctatcagatttttgtggaccgttttttctgtggaaatacaaaaaaggaccgctcctatatcaatatggagtggggagcgctgccgacaccgaaaagttttgcgggcggagatctctgtggaattatcgaaaaactggactatctgaaggaccttggaattacggcgatctatctgacaccaatcttccggtcgatatcgaatcacaagtatgatacgatggattatatgcagattgatccgcagttcgggacaaaagaagaattcggggaactcgtgcgcatggcgcatgcccacggaatccggattgtgctggatgcggtgttcaatcactgcagcatgcagatgcagcagttttgcgatgtcatggaaaaaggagcggaatcaccctactacgactggtttttgatcgacggggcatatccggttccaagccgggcgaattatgaatgttttgcggagtgtacctatatgccaaagcttgacacggcaaaccgcgaggtacaggaatatctgatcgggatcgcgtgctactggatccgggaatacggaatcgacggctggcggctggacgtctcggatgaggtgtcgcatgtgttctggcggcgcttccgcgaggcggtcaaaaaggaaaaagcagatgcggtcattatcggggagaactggcatgatgcatatccgtatctgcgcggcgaccagtacgacagtatcatgaattatgcattcaccaaagcctgcctggattattttgcgagaaaaacgtttgatgcaaaacagatggcggaaaaactgtcgtccaacctgatgcgcaacatggagccggtgaaccggatgatgttaaatcttctcgattcgcacgacacgcaccgcttttactcggaagtcggggagaatcccgacagactgctggcggcgcttgcactggagatggtattcccgggagcaccgtgcatctattacggcacggaaatctgcacgccgggcggctatgatccggattcccgcagatgctttgactgggaaaaggtgcacaccgataccgacgtgcgaaagaagctgacggagctgacgcatatccgcagctgcaccgcgatcaccgacggaaatgtggagcttgcagcggaaaacgggatgctctgtgtcaggcggaaggccgggggcgagggcgtatcgctgtacatcaatatgacggaggagcagaggcggcaggaacattgcctgaaagcggacagcaaggtgctttctgctcaccgggcatcggttcttccggcagctggtgatgggaaaatgacctgcggcgtctgcgtggagccggaagggtatctgattgtgagagagcagagggaagcgttggattgatatgggcggaaattccgcagaaaagaggaagcagatgaaacgaaaaaaagaggtggcactgttacttctgacagccgtccttgcggcagcaggatgtgcggatgagaagacgacgggggagaagacgacggagagcggcagcgctgccgcggtatccggaagcagtgtttttgacggtgaactggaggagaatgtcacgatccgggtattggaaaatgacaccgccatttccaagggatattttgaggagctgattaccgcattcaatgaggcgtacgccgatcagggaatcacggcggtggatgccaacatggatcagtacctggatctggcaaatgacggaccttatggctatggaccggatgtgttataccaggcgaacgatgtcatcatgcagtacgccaagggaaaacatatctatccgcttccggtacagcagctgtcctgctatgagcagattccggagagcgcgtggaaggcatatgagacgaccgtggacggcacgacctactgctgcggtgtcccggtcaatgtgcaggcgccgatgctgtactatcgggcggatctgctgccggaggactggcaggaaaactgggatgaggatcagaacggcgtgccggatatggtggagaactggaacgatctgtatgcatattccaaagaacgccatgaagaaaatccggcgcagtacgggtatatgaagtcgctgtacgatgtgtatttttccagcggattcttattttcctacggcggctatgtgttcggcgaggagaatacgaacccggaggacgtcggattttctgccggcgaggcggaaaaaggcgcgtgggttctgcagcagcttgcgggtgtgatgaacgaggaatgtatcgacgacacgatcacaaccaacgcatacagcaaactgggggatggcacctattttgcgacgctctcgacaccggatatgtactccacgttcgcagatgaactggaaaaagaatacgaggcggagggcatgaacgaggaggaagccagggagacagcaaagcagaatctgatcatgacgacactgccgaagcttccggaaagcggcgatctgtcggagagcgatccggtactgatcgatatgaaagcgatgggcggagtcaacggatacgcagtgagcgcgtacaccaaggcgccgaatgcctgcctggcatttattgattttgcgacaagctatgagatggtcaccagacggagcgagatgctcggaattgcaccggcgcgcggcgatgcggcggagagtgcgggggacgtatcggagaaaatctatgcaaatctcgagaacggaaatgtggtgctgatgccgtccatctccgaggggtcgcagatctggacgccggcacagaccttttttacagatttagcgaaggacgcgttccgaagcggcagtgagaaaaagtatcaggatctgcctgcgctaaagagcgggctggaacaggtggatacacagatccatgacgcaatatatacgttaaagtagcagatatggagagaacggtatgaagcaaaaaataaagcgtgctgctgcctggtttggtgacagcagcgggaacgtaaaattatcaatggtcatcatgggggcagggcagttccgctatggcgcaaagggaaaaggcgtgtgctttttcctgtcggaagtcctgatgatctgctatatggcaatgcgcgggtgtcgtgatctcgccggtttttttacactgggtacgaccagaggggatgcatggcttggcgtagagggagataactcggttgtcatgctgctgatgggaatatttgcgtggatcgtcctggcggcgtttgtgtgtatctactgcggaaacgtgcgcgacgcttaccggatgcagaagcggatcgagcagggaagaagcgtgttgtccttccgcgaggaggcggcacaactgctcgacaaaaagttctatgtcacggtgctcgcgctgccggtcatcggtgtatttatctttcagatcctgccggttctgttcatgatactcattgcatttacgaactacggcggagacattgtacccccggaactcgtggactgggtgggacttgcaaattttaaaaaactgctgacgctgacgcagtttgcaccgaccttttttaagattctgggatggaatgtcgtgtgggcgcttgtctccactgcacttaattattttgccggtctcggactggcgctgctcctgaataaggactgcgtcaggggaaaagccatctggcgcgcgtttccggtgctggcatacgcaattccgggatttatcaccctgctggcgtttaagttcatgttttcctacggcggaccggtcaatcagatcatcgtggcacacgggggcggcgcggtcggctttctggatctggatgccaagtggacggcgcgcctgatcggacttctggtcaactgctggatcagtacaccgcagatcatgctgctcgccacaggaatcctgtcaaaccgggatgcttccttatatgaagcggcgcgcattgacggggcgggacgcatgcagcagttccggaaactgacgctgccgttcgtacttttttcgacaatgccggtgctgatcggacagtttatcggaaatttcaacaatttcgggatcttttacttcctgcggggcgggctgtatatggacggctatttccttgcgagcgatacggatcttctgattaactggctctataacctgtccatcgacaacaattattactgcatcggcgcggcgatcagtctgattattttctttatcacatcggcaatatcacttgtggtttacataaagtcaccgtcttacagggaggaggatacgtttcaatgagcagaaaaacagagaaaaagcggcggatgtccgcaggaagaatcctcgataccggaatgacctatctcatattgcttgcagtggcgtttgtattcttctttccgtgcctgtggctgatccttgcatcgttttccaaatcgggaacgatctattcgtttgacggttttttcccggccggatacagtctggtgagcttcaaacggctgtttacggatacggcactgtacaactatccgcgctggtttgccaatacactttttgtggcggcaggcagctgcatcctcggcacgtttctggtgattctgaccgcctataccatgtcacgttttacgttcgcggcgcgcaaaccgatgatgaagattacgatggtgctcggaatgtttccttcctttatgggaatgattgcggtgtaccttctgatgacgcagtttaatctgatcaatcatctctggggactgatcttaatctacagtgcgggagcgccgatgggctatctgacgcagaaaggctttttcgatacgattcccaaggcgatcgacgaggcggcgagaattgacggagccacgaattttcaggtttttatgaaaatcaatctgccgctctcccggccgatcatcgtttatactgcgctctcttcttttacctggccgtggagcgactttattctgccgaagcttttgctgaaggaaaagaacctgtatacggtggcggtcggtctgatgagcctcgatgagacggaatttgcaagatttgcggcgggaagcgtgttcatcgcggtgccgattgtcctgctttattttttcctggtcaaggacatggtgaacggcatggctgcgggcgcggtgaaagggtgatccggaatacaaagtggcagccgccgcggaacggtgatccggaatacaaagtggcagcagccgcggatttgaataagatagaatgagaaagccgtttcgaggaaaaatgtgcagacagttttattgatcgtagcgctctctatggacgtctttctggcatccgtggcgtgcggggcggaacagatccggatcgaaaagaagacagcactctgcatcggcgcggtatgcagcggagtgctgtttttttcattagtgtgcggaaaactgatcgatggagtggtcagggaaaaatatgcggcgtatctgtgttttgcgggattgtttctggtcggcgcttataagctgacggagtacggaatccgggcgtatatcaggagacaccatttcctgtgcaagcaggtaaaaatgaaattttcacagctgaattttatcatcagcatttacaataatccggcggcggcagatagggattgctctgcgaccatgtcagtgacggaaggaatatgtttcgcgctcgccatgtcggtggacggatttttcggcggtctgggggcggcgtttctggatatttcgattgccggcacggtatgcctgaatctggtattcagtgcacttgcggtgcttggcggaagcgctgtcgggaaatatgcggcggaccggtgcaaaagagattactcctggatcggcggcgccctgtttgtggtgctggcattcagcaagattttgtagatttatagtaaatgtgtcaaaaaaagcttgcgttttcattgcggtatggtataatatgcctatacatgaagcagtggaaacgcacagctcttgtaaaatataattagatattgtgggatctgagagtggagatgattttaattcctgtgcacatgaggggtgcttacaggttttatgacgatgtctcctttttttatgcgctgcgcatggggagcacggggcaggaacggatttcacaatagagggaagcataaataagcaataaggggcaaacaaggaggaacatggtatggcaaagtatgtgatggcactggatgcaggaacgacgagcaaccgttgtattttatttaacgagcagggagagatctgttcgatggcacagaaagagttccggcagttttttccgaatccgggctgggtggagcacgatgccaatgagatctggtctacaatgcttggcgtggcggttgaggcgatgaacatgatccgcgcgacggcggcggatattgcggcgatcggtatcaccaatcagcgtgagacggcgattgtctggaacaaggagactggagaaccggtctataatgcgatcgtgtggcagtgccgcagaacttcggacattgcggatgcattgaaggcgaagggtctcgaggagacataccgtcagaagacgggactgatcattgacgcgtatttttccgcgacgaagatcaagtggattctcgataatgttgagggtgcgagagagcttgcagagcagggcaagctgctgttcggaacggtggagacctggctgatctggaagttcaccaagggtgcggtgcatgtgaccgattattccaacgcatcccgtacgatgctgttcaacatcaacgatctgtgctgggacaaggagatcctggaggagctggagattccggagtgcatgctgccgacaccgcgtccgtccagcgaagtctacggctacacagatccttcgtttttaggagatgcgatcccgattgcgggagctgcaggcgatcagcaggcggcgcttttcggacagacctgtttccacgagggcgaggcgaagaatacctacggtaccggatgtttcctcttaatgaataccggagagaagccggtattttccaagaatggcctggtcactacgattgcgtggggactcgacggaaaggtgaattacgcattggaaggttccatctttgtggcgggcgctgcgattcagtggctgcgcgacaacatgaagatgattgattcttccatggattcggaatatatggcgaagaaggttcacggaacacacggctgctatgtggttccggcgtttacgggactcggtgcgccgcactgggatcagtatgcgagaggcacgatcgtgggattgacgagaggaacgaacaagaaccacattatccgcgcgacgctcgaatcgattgcactgcaggtgtgcgacgtcatcgatgcgatgcgtgcagatgccggcattgatttaaagtccctgaaagtcgacggcggtgcaagtgcgaataatttcctgatgcagtttcaggcggatatgatcaatgcgccggtgaagcgtccgcagtgcgtcgagacgactgcaatgggagccgcttatctggcaggtctggcagtcggatactggaaggataaggaggacgtggtcaacaaccagaagatcgaccgcatctttaccccggagatggaggaggaagagcgcaaggcaaaacgcaagggctggaataaggcagtcaagtatgcgtacggctgggcaaaagacgagccggaggaagaagaggaatagtagacgcgttagaagcaagcttaccatatactataggatgaaacgaaaccgcgcagagccggaaacggactcgcgcggtttttcactccagaggatgcggtgcttcctgtgcagctgccggtatcccggatattgttgaattttcagattcatggtagaatgagttaaaatgtgatggaagagttctatggatcgggcattgtgaaagaggagcagatacagatggagattcgattattatacggaaatgagatacagtgggcggtgcagacggcgcatgaggtctatgagcagtgtgtgcgtccgtatacaagaaatgcggcggaggtgcagcagtattatgactatatgaatctgcccaatctttcacaggagatgctggcgggaaggctgtttttatggggcgcatttgaaaacgggcagatgtgcggcgtcagtgccatgcagaatgtcggacatatcacggcgctgtatgtaagaccgcagtattttagaagacggatcggcagcaatctggtggaccggatgtgcaactttgcggcatcccgattgcagtgcgggcgagtgacggtgcaggctgcgccgtcagcagcgaattatttttaccacacgggatttacgctgattcagggggcaccggcgggaatgtacgtgccgttggagagaagaatctggtcggttccgatgacccagggatacatgggaaatatcgggggaagcggcagtacatccgcgcagggcggtggtgtgccggtggcgcagccgcggcgcacaaagccggagatcaattatccgaaaaagaaggtaagcgcccggatggtgctttggcttactgcggtaaccatcgccttcgcagtggcggtagtgacgggaattaccgtatatcatatcacacaggagggaatcacgggcggatatgagatgcctgatccggtgggggacgaaaatacggaaacggacgatggacaggaactgtagcaaaagagcaggcatttaaccggacaaagaagcgcaggacgcgaagcggaaggagacggaaggtggatacgacgacaaagggaacccgcacaaaataccgtctggcggaggcgatgaaggaatgcatgaagacgacaccggtcgataacattaccgtgacacagctgacggaattgtgcggtgttacaaggcagacattttatcgcaattttattgacaagtacgatctgatcaactggtattttgatattttacttcacaagtcttttgagcatatggggagcgggaaaaatatttatgagagcctcgtgaaaaaatttatctatattcgggaagagcgggtctttttttccgccggttttaagtctgcggaccagaataatctcaaagatcatgatttcaggctgattctggcgttttacgaggatctgatccgacagaaaacagggaaaatgcccgatgaggagattggatttttactcgagatgtactgccagagttccgtgtatatgacagtgaaatgggtgacggaggggacgaagatgccgccggagcgcttagcagagcttatggtgaaggcgatgcccgagaaaataagcgagttgtttgaacaattagaaatattgtattgataatagaggattttaaaatagaaattgtgataaatagttacacttcccggattctgtcacttcccttttgtacattgtgttgttaaaatacgatcaaagatcattatgtatgggaaaggggaacaaaaaatggcaaacagaattatgttgaatcagacatcctatcatggggcgggagcgattgcggagatcgtgaatgaggcgaaagcgcacgactacaaaaaagcatttgtctgctcagacccggatctgattaagtttcaggtatccacaaaggtaacggatctgctggatcaggcagggctttcctacgagatttattccaacatcaaggcaaatcctacgattgagaacgtgcagaccggtgtggctgcgttcaaaaaatccggagcggactatattattgcaatcggcggcggatcttctatggatacggcaaaagcgatcggcattatcatcgcaaatccggaatttgaggacgtcagaagcctggagggcgttgcgccgaccaggaagccgtgtgtgccgatcattgctgtgccgacaaccgcaggtaccgctgcagaggttacgatcaactatgttatcacggatgttgagagaaagagaaagtttgtatgcgtagatccgcatgatatgccgatcattgctgtggtagatccggaaatgatgtcctccatgccgaaggggctgacggcatcgaccggaatggatgcgctgacacatgccatcgagggttacacgacgaaggcggcatgggagatgacagatatgttccatttaaaggccatcgagattatttcaaaatctctgcgcggcgcggtggcaaacacgccggaaggacgcgagggtatggcactcggacagtatatcgcaggtatgggattttccaatgtcggtcttggaattgcccactccatggcacatacattaggtgcggtttatgatacgccgcacggtgtggcatgtgcgatgatgcttccgattgtgatggagtataatgcagactgcacaggcgagaagtaccgtgaaattgcacgggcgatgggcgtagaaggtgtggatgccatgtcccaggaagagtaccggaaagccgctgttgcagcagtcagaaagctctccgaggatgtgggaattccgtcaaaactggaagctatcaaagagtcagatcttgatttccttgcagagtccgcacatgcggatgcctgcgcaccgggcaacccgaaggatgcatcggtggaggatttaaaagagctgttccgcaagattatgtaatccatcttacatgaacgcaattaagaagttaggttaggacagatcccccctttgccggattgccggcggagaggggatttttcgcataccgtttgagtgcgccggtgcgtgtcagaaacaggtgagaaaagtcgtggcgggaagctgccaggtatgatagtataaaagagaaagaagaaaatgaggagtggcggtaaaatgaaaatcagacagttgtatgcgtatgaactccgaccggcggcagcgctggtgatggagacatacagcaggatggagcagccgtatgtggcgaatccaaaagagatagaggatttcaaacgctatgcagatgaagaccatctatgggtggaatcatgtaaaaataagctctttttatttggagcgtttgatgataatgaccagatgtgcgccgtcggtgcgatcgatgcggcgggtgcggtcacgcttctctacgcagggctgaatttccagcatcggggactggaggcggaagtgctgcgcgagatggaggagttcgcgactgtcgggcgcagtattgcaagagaagagataaagattccagggaagtggatgcagtatacagcgacagcgggtgcgccggagcagtcgtctgtgacagagcagcagaccgcgccggggcagcagtcgtctgtgacaggacagcagaccgtgccggggcagccgtctgtgacagggcagcagaccgcgccggagccgcaggcgtaccggaatcagaacacaggctacggacaggactatggtcagcagcaatatcagaacacagggtatggacagggctacggccagcagcagaatcagaatatgggctacggacagagttacggtcagcagtcctatcagaacacaggatatggacaggggtacggagagagttacggtcagcagacagcacctcaaaaaaagagccgtgctctgctgtggattgtactggcggtcatagctggtgccgtgctgcttgtgaccgtgccggcgttcattctttttcacgcggtcaaccgtaccgtgcaggatacgttgacgtggaatgagtcgtctgcagaggcggacagagacggggaagatggcagcgatacggaggacgatacggcggtagaagacaccgaggaggaacgtgaggtattagaactgccggattctctgggaaaggatttttttgtcacacaggatgacatttatgtggcagatcagctttcctatacggttaccgcgcagcatattgaggtaccgaatcagcggaaagacggatttgaggagtacgatgtttcttatccggttattacctatgcggatggaagagatgcgaccggagtaaatgagattctgcggaatgccgcctgtgcgcagctggataccatgtatccggagccgcaggaagaatatttgtatctggatgaagactacccgtatctggcatgctatgtggactatgagatcacgtatatgagcgatgagattctgtgcgtggcatttcaggatcactattttaatggaagcatgtggggagagttttgtgacctgcgcacaagagtcatcaatcttgccacggcagagcgatatgaggttgaggatgtgctgcgttcggatgatacgtttgcggaggcttattatgaaaaaatctgcgagaagtcggattctttcaacgatgcacccgcatttaccgcccggatggcgggacagacgatggacggggagattctggagggaagatattacagcaactatgtcctctgcaaaaatgatatttatgtgaatcttacctatcattattacgatgaaggactgattatgcacggctgggattccacgcagtggacgatggaggaactggaagcgtaccggacggacagcgatctgtgggagaaatatttgaagtgattttacgaaagtggaaacaaaattgtttccacttttgctattttcttgtgccctgctggttctcagaagagaatattgaaattttatagtaaagaaatattgtaattttttttcagatcatttttcagaccggatgcattgtagatgtcctccataaggagggcattgtaataggcatagtgtgcaaattcctttgcggaatttgtgagaccaagtgatcctaatgcctgacagtagtgtgaaaaaatgttccctgtaaaatacattgaacttatagcatcggaaaaaagcgggactaacgcaacgatttccgaaagacgattttctgtataaagaaatcttataagcattcccaaggttacggggaaggaacgctttttctcgagaacatccaacggaacatggctggtatattccagaagcttataaaaacagtaaatgccatgtgtaggatttatagttgcataagtgcggcagatattgtttaaaatggtaagttctatccacgataatcgatagtcaagaattttatcaaattgaaagccgggcaaagtcatgaaaagagcattttttaacccttttaatttttgatcattgtcggattcacagatggctgatttgtaagcagcaaattgtaaatagcagatatctttggagttgcatagcatctccattttttttacaagatcaagctgtaaggttttgtgattcatacgagttttcgctaaacgaagctggagttcctgcagtttgttctctttttcactcccgtaaaatgtaaaaacaagatccgaaatacctaggcgttgaagcaaggtttgagcaagaatgatatcaggctgctgtgtttcgttttcgatttttgaaagcttggatttgctgcataatcctcggcaaagcgccgactgagataatttttgatctttgcgtagagagcggatcaggccccccagcgtgagaaccttgtgagagaaaaagtcataggtgccatctcccatagaagagacatttatggggagcttgaggggaaacgatataagcggaatatcagaaaataagtttaagtcttcaaccaaagttgcagaaaggtggttggaaacataatttctacagatggtggcataacagctgttaatggaatgggcagagaaaaaggcagttttaaataaggtcagaaaacgatcctgttgtcccatataatagtatccgagtgcggttaaaaacgtcagttcatgtataagtccgtcgtcaagatttaaaatcatttgatggcggtagaagtccgacagttcaagtgcagacttatagtcacagacagtcagcagatatttggtatataccaccgcattttccgcaagtaaacgatcccgttcaagaaaagaaagcgaacgggcagagagataggaagaaatctgctggcagacatgatgagcagtagctgtatcaccaaggtacagtgcttcctgcgcaagatatataaatagttctatttcgacagaagacaaaaacagagaatggattgctgcattgtcgatatcagatcttgtgatttttaaagcaaagcgaaccagctcataagtatgggcgtgatttgcatgaccagaacgtaattgcagcttgcagtgaagcagaagccattcctgatagtaaaatttattgtctgcccaattcagcatttcaatgtgatccaataactggcaggcgggcgtgagttgccaggaatccagataaaagcgtacttccttcaaggcgtaaaagcagtcaaagtctgcgcgcgtcgagaaagtaggataagcttcacaaaagataccagcatgtgccattaaagtctgaaaagtggcagggctgacaccggcagagccgttctcaatgcgggacagagagagggtagaacagactccatcggataattgttcctgggttagacccgcattaaggcgggcctgtctaataatagaaccggcatgttgtacactcatagaaaatagctcctttatatgaaactacaaacagtataaaacggacatagggaaaatgcaaggttttgaaaaacctgcataaatgtcggaaaagtttccatttatgaaattaaaaatgtgagaaacttcaagtatcataaaggtaaggtgtggcagcacaccttacctttatgataaagacggagaaaagtatgttgaaatatgagatagtatcgattcttagaaataaggcagcctatatttttctgttggttgttctgctttttggattaaaagctacggtggaactgcaaagatcgattacatccagtcaggacacgaactatataaagcgggaactgcaatatgaacttgtgatgcatcggcagctgttagaatcggagcttgctactgcgcgcagagatgcaggagatgcaaaacggcgaaaatttaatacaaatgcaatacaatttcgtaaatggagaatagaagaattacaggaacttattgcattgcttgaggtgggcgggacagagtcacagcagttccagaaggaatataaggcatatggggtgatatgcagtattgtatcataccagatgtttgtttatccagagcgtggatgcagccctgttgaagtacgttgtgcagatatgtttcagaaatggggcaggcagctgggactttatgaccttccgtttgacatttcttctatgactgcgaatccatatgtatcgtccgaactgatggaagcttctgttgcagcgtatgaaaataatatgggccgtctggaacatttattaaatgattatgataaaaaaagtctgggattggactcgggatcgccctatgcttttttagagactctattttgtgaaaatgcgtatgtacttacgatattagatatttgcatcctgttattttcttttggctacattatggaaggaaaaaatgaccacaggtatgaatttatgacagtgcagccatacagtgagtggaagaagtacaggcattatgtgacctctttttttgtggcggcaggagttgtgtgtgcgattggaataggtgtgtggtttttatattggggaatgcgatgcggctttgatgggattgacagccatatgtttgtggatgttaaaacctataagaggttttattcatacgagcatctggaagattactcctatgaggggttagcccgcatgtatgcggattataagtatacagacggaggaagaggagtcatgctgtatacaacttatccgttgggatcacttccgttatatcgtttcctactatatatgtgtatacttgcagctttaaaagttttgttttttgcgatgcttggaagcgggattcgagtgctgatacagcattcacagggcgggattgccgtggtggcagcagcaaccgtgcttacaggatacagtcagctgacaggctggggaaaaccatataatccgtttgcgattggatcctgctggaatgtgacgctgggatcagaacggatcacatggctgtatgcggtattggaactaacattcagttgtattttgattatgataataacgtgtactgtatccgggaaaaaagacagaatataggggagagcggaatgaaggttttacaggttgaagatattgaaaagtctaagaaaagaaaaaagattctgaagggattaagtttttccgtggacgaacaggagattgtaggacttttaggaccaaatgggagcggaaaatcgactacaataaaatgcatcagtggattatataggacagatagagggagaatcagaatctgtgggaatgacatcaaaagcaaccgcttagaagcattaaaacagattggaattgccatggaagtccccgctctttatcctgaattaagcggtatacagaatctgcggatggcagcaacagccagaaaggtgcccaaagagcgggtggaggaacttgccgttttcacagatctgggggacagacttttggatcgcaccggaacctattccatgggaatgaaaatgcggctgaatctggcaatagcgattgtggatcaacccaaactggtaattctggacgagcccaccaatggccttgacccggaagcagtttttcggctgcgacgggaaatcgaggagattcgtcagagggggagtgctgttttgatctcttcccatcaactttcggaagtggaaaagattgcagatcgaatcgttgctattgacgatggcatggtttgttttgatggaaagcttgatgatctttccgacaggtttgaaaatcttgaagaattttacaaaaatttgtatggagcagataagaaatgaaagcatttttgcaaaatgaaatacggcttttctttagccggaaaaattacctggtctggattgtgggagtgctggcggttgtttttgcatatagactttactatgttacacagtatgagaattatgcgcagacagtgttggaagaactggaagaaaatgcaaaagatattacgatctgggaatctgagtatcagaggcagtgcatggaactatggggggacaatagtgcagaaaaatttgcacatgccagtttattgctaaatgcatggaaacagtacgaacagaccaatattcggttgcgttattattgggaacaggcttgggatgagaatggaattcgcaggacggtgctggaggaagacgaaaatttaatagcgattgaggaactgggagaggaagtggagtatacgggcatattcagagggagtgttgctgattggagagcacgtatgctgttacataaagcatatcagcagagcggaacagaggaaccggtctgtccggttgtgcctcaggctgcatggttatggaaagaggctttttctggaaacagtgtattatttttgatttttacagttttgattattttgctgcattttgatgcgtgggcgaatgaatttgaatatgcaacttgttacagactatacatcctgccaataaaaaaggaatggttgtatctggaacgattttttgtacgtgtactggtgagtgtcgtatgtgttggcagtgcggcaggcatattatttctgcttggaacagcacgatatggaaccggaggacagatgcttctggtgatttctgaacaagggacgcagacggtgatatcgatatggagtcttgtgcgagaagaaatattaggaatgcttctgtatatagtttttctgacggctgcagttctgctcatttcttttattgtaaaaacgaaaatgaacgcattgatgatatgtgcagctttttgtatgacagggattgttcaaacgacagcctcagatggaaccggtaaaggcatcgtggaatggctgccacagctttctgccttaacgttgcttatgctgctggcaggctgtattctgatccgtataagagaggactaggaatctgtttggcaataatgtataatttttatacatcacagtgtaaaaattatacattatttgatttcggaaaaaggttgaaaaatatcctatgatatgataaactttttacaatttaggaaaaaggcatagcactgcccataatggcacgaagacgatgcatcacacaccgtgtgcatgtgcgttctggaaaaaagaagaaaaacggaaacgtttttttttttgggaaaaaagtgaaaggacagggagacgaatgaaagcttttttgatactcgaagatgggaatgtatttacaggaaccagcattggttccaccagagaggtcatcagtgagatcgtgtttaacacatcgatgaccggttatctggaggttctgaccgatccgtcctatgcgggacaggcagttgtgatgacctatccgctgattggaaattacggaatcacgccggatatggagtcgggacggccgtggccggacggttatattgtgagggaactgtccagaatgccgagcaatttccggtgcgaggggacgattcaggattttctcgcaaaatacgatattccgggaattgccggaattgatacgcgtgcgcttaccaagatccttcgtgagaagggaacgatgaacggtatgatcacgacgaatgagaactataatatagaagaaatcattcctaaattaaaagcatacacgacaggcaacgtggtagataaagttacctgtacggaaaaacgagtattaaaaaagcagggaaatgcccctgagacgaaaaaagtggcgcttcttgaccttggagcgaagcgcaatattgcccagtccttacgagagagaggctgtgaggtgacggtatacccggcacatacttctgcggaggagattctggcggcgaacccggacggtatcatgctgagcaacggaccgggagacccgaaagagtgcaaggagatcattgcagagatccgcaagctgtatgaatccgatacaccgatttttgcaatctgcctgggacatcagctcatggcgcttgcgacgggagctgacacgcacaagatgaagtacggccaccgcggaggtaaccatccggtcaaggatctggcgacgaaccgcgtctacatttcttcacagaatcatggctacgtggtagacaccgataccctggatccgaaggtggcgacaccagcattcgttaatgtcaacgacggaacgaacgagggactttcctatgtcggcaagaacattttcacggtgcagttccatccggaagcgtgtccgggaccgcaggattctgcatatctgtttgacagatttataaacatgatgggaggagcgaaataatgccaagaaatcaggagattaagaaggtacttgtaatcggttccggtccgattgtcatcggacaggcggcggagttcgactatgcaggaacacaggcatgccgttccctgaaggaagagggcgtggaagttgttctggtcaattccaacccggcgactatcatgacggataaagacattgcagatcaggtctacatcgagccgctcaccgtgccggtgttagagcagatcattgcaaaggaaaagccggattccatccttccgacccttggcggacaggccggattaaatctcggcatggagctttccgagaaaggaattctggataagtacggcgtgaagctgatcggtacgaccgcagagaccattttcaaagcggaagaccgccaggcattcaaagacacgatggagaagatcggagagccttgtgcggcatccgaggtcgtgcacaatgtgcaggatggtattaagttcacaaacaccatcggctatccggttgtgctccgcccggcgtacacgcttggcggaagcggcggcggtattgcacacgatgagaccgagctgatcgagatcctgacaaacggactccgtttaagccgtgtcggagaggtgctcgtggagcgctgcatcgcaggctggaaagagatcgagtacgaggtaatgcgtgatgcgaacggcaactgcatcacggtatgtaatatggagaatattgatccggtcggcgtgcacaccggtgactccatcgtagtcgcaccgtcacagacgctgggcgacaaggaatatcagatgctccgtacctctgctttaaatattatatctgaattaaatatcacgggcggatgtaatgtgcagtatgcactcaatccggagagttttgagtattgcgtcatcgaggtaaacccgcgagtgtcccgttcctccgcgcttgcatccaaggcgaccggttatccgattgcaaaagttgctgcaaagatcgcgcttggctatacgcttgacgagatcaagaacgccatcaccggaaaaacctacgcaagctttgagccgatgcttgactactgcgttgtcaagattccgagactgccgttcgataaattcattaccgcaaaacgtacactgaccacacagatgaaggcaaccggagaggttatgagtatttgcaataacttcgagggagccttgatgaaggcgatccgttccttggagcagcatgtggacagcctgatgtcctatgattttaccggactttccagagaggaactggtaaaacagcttcacgttgtggatgaccggagaatctgggtgatcgcagaggcactgcgccgtggtatggattacgatgtgattcacgatattaccaagattgataagtggttcatcgataagctggcaatcctggttgagatggagcagaagttaaagagcgagccgcttacggtagaactgttaaaagaggcaaaacgaattgagttcccggataaggtgatcgcagaactgaccggcaagaccgagacagagatccacgatatgcgctacgctaacggtatcgtggcagcatacaagatggtagatacctgtgcggcggagttcgaggcgaccacaccgtactactattccgtattcggcagcgagaatgaggcggaagagacacatccgaacaagaaggtgctggtacttggttccggaccgatccgtatcggacagggaatcgagtttgattactgctccgtacattgtacctgggcattcgcaaaagaaggctgggagaccgtcatcgtcaacaacaacccggagaccgtatcgacagactttgatattgcggataagctgtactttgagccattgacaccggaggatgtggaagccatcgtaaagcttgagaagccggacggtgcggtggtgcagtttggtggacagactgcgatcaagctgacggagagcctgatgaagatgggcgtgaagatcctcggaaccaaggcggaggacgtcgacgctgcggaggatcgtgagctcttcgatgagattctcgagaagaccaaaattccgagagcagcaggcggaacggtatttaccgcggaggaagcgaaggaagtggcgaaccgtctgggctatccggtgcttgtgcgtccgtcctatgtactcggcggacagggcatgaagatcgcgtttaacgatgacgagatcgaggaattcatcggcatcatcaaccggattgcacaggatcacccgatccttgttgacaaatatctgcagggcaaggagatcgaggtcgatgccgtatgcgacggaacggacatcctgattccgggtatcatggagcacatcgagagaaccggtgtccattcgggagacagtatttccgtctatccggcgccgacgatcagcgaccatgtaaaagagacgatcgtggaatatacgaagcgcctggcacaggcactgcatgtcatcggactgatcaacatccagtttattgcgatgaatgaagaagtctatgtcatcgaggtaaacccgagatcttcaagaaccgtgccgtacatcagcaaggtgaccggtattccgattgtcgatctcgcaacgaaggtcattatcggaaatacgatccgcggacttggctatgagccgggacttgcaccgacggctgattacattgccatcaagatgccggtattctcgtttgagaagctgcgcggagcggagatttcccttggaccggagatgaagtccacgggtgagtgccttggtattgcaaagacattcaacgaggcattgtataaggcgttccttggcgccggagtgacactgccgaaatataagcagatgattatgacggtaaaggatgcggacaagccggaggccgttggtgttgcaaagcgctttgaagcgctcggctacaagatctacgcgaccagaagcaccgcaaaatatttgcaggagcatggggtgaatgcgctgcgtgtcaataagatcacacaggaatccccgaatgtcatggatctgatccttggtcataagattgatcttgtgatcgatactccgacacagggcaatggagacaagacgcgcgacggctttttgatccgccgaaatgcgatcgagaccggcgtgtactgtatcacagcgatggatacggcaaacgcacttgcaagaagccttgagacagcgatggatacgctgactccggttgatattgcgaaagtgaagaatttataaacaaaaaaaagaatctcgcttgcgagattctccgcgcgcgagcggttcgcaaagcgatattttccataccgcgagctgcgcatccgcgcggagcgattcttatttcataggaaggacctactttcgtacattaatgtgtcaaggtatttcttatgaaataagaaagagcctgtatacggatggatgagaactcatcgcaccgttacaggctcttttttggtaaaattttctgttgtcatggcgttgctccgggattagttgtaatatggatgaatgtcaactccgtacattgcttcaacacccattgcgactccgtcgatattctccatgaagaatgctttgatttttgctaacataataatttcctcctttattgaattggtacatttttgcttgttcatcaaaggttttccctttgacagctattataatacacggaaatatggtaatattatagataagatattagcaaaaagttgggtgatattgacttttaggagaaaaaatggaagaacagaaaaatacatatgaaaatgttacgctcgaaccggacgtcggctttgatatccggtttgttacgatggatcataactctccgtttcactggcaccgggagatggagattctctacatattaaacgggcatgccactgtgcatatggagggtgaggaatacgaactgaatccgttggacgcggttgtgatggactatgccagaattcatgaagtcatctatgcgctgccgcagacaatgggaatctgtatccacgtgtcaaggcagcttctgcggcgctatctgccggaggcggaaccttttgcgatccgctgcgcgggacagcgtctccgtccagggcagcaggaatattacaatgaaatctgcgggtatttaaaagaactgacggtgctttatgtgaatcagaatgagacgtaccggttaaaaagcacggcgcggattctggaattgctggcatgtctggtggaacatttttcggaacctgtctccatggtggcaacgcagacgagggcggggaagatggagcggctggagcagatctgtatgtatgtggatcatcactacagggaagaaatgacgctgcaggaagcggcggatgaactggggctcaaccgggaatacttctgccggttctttaagcagagcaccggcagctcgtttatgcgctatgtaaatcaggtgcggctcaattatatctatcaggatctgctgcacacggacgatccggtacaggagatcatggagcggcatggcttctttaatcagaagcttttttaccggatgtttaaggagcgttaccactgtactccgcgccaggcgcgccggatggcggaaaacaatccttatgtggaagcaaaataaccgcgctgtatatgcaggggggaggatataagttccggatgcagcccggtgtgaagcatccttgaagcaaaatacgagcatttcttccacgtcgtgtttgacattttattctgtgtctttgccacgttttgacaatccacaggatgtgtccgacaggttgcagacaatgggcggacttcctggtgtccctaatgtcatcgcttcacagacaatataaaaccgcgcgaaccgaaactcgcaggcatctgctattgaagacacggcagatacctgctcagacatcggcttcgcgcggttatgttttgttcagcgatgacagtaagggacacacacgaaagtcctaaaattgtctgcaacctgcggacacacctcgtggagtgctcaaaacttggaaagacacggatcatcgagaatgtcaaacacgatgcggatagaaatgccggatttggcggttagaatgcttcacaccgggctgcatccggaacgatacgccgttcccacccttcacataaaatattaaaccagtttcatgcgcttgcggggcgctttcctgatcggggaagcgtcctcttccggcaccggtgcaatgggcggaggtgtgagcactctggcattgtccaaaagatcatccatgctcttcttctgggcagctttctgcttgcgctgtgcgatggcaagctttttctgccggaaacggtcagccgtctcacggatgtactggtctgcgacaaaatgctcgagcgcctcctcgtcgatcgcaatccggttgtccatggttttcatgatgtccgtcacacgcagggaatctccgatgaccggatcactcagatcgtagatcatattgttggagaactttaagatcatcgggcgggtaaaatccgcggcattttccacgaggacgagcgccttctcaccgtcggagagatcaacgcacgcgccggtcgggagaatgtggatgcattccgccagtgcggcaacgacgcgcggattgtaggtccggctgtgtctgcgcaaaaaagacatagcggcaacctccgagaccggcggattgttaatattcatggcggtaagccggtcaaactgatctgccacctttaaaatatcacagagcagacgtgtctccggggaaggatccttgatctttaaggtctgactcttctggaagatgaactgctggataatctctaaggaaatcttcggaagattgcactcctcatagcgcgggcggattgattcataaccgcgttccagattcatctggataaaattccggtcgctgtccgagaggtcgtcgcccttgtcgaggatggcctgcggaacatacagataaccgaaatcatacagcagggaagccgtgatcagcgcccggatatcttctgccgggagctgcatctcattggagatcattgcggataggataccgacactgatcgagtgtttgtatacaaagtccgcggaactgcggagtgtctgcgtaaaattcagcttgtggtcaagactgccgtaatgccgctggatatcatcgaccagcgagagcagtgtggacgggacaagattgtcgacaagcttgtccatgttgtcctttaacttgaacatgtagatggtctggaactgttcaaactccagatcttcccgcgaaagcggtggcagcggttcagccggctccagaataaaaatgccgatcagaccaaaattctcaatactgttaataccctggatcgtgagccttgtatcccgttcgtataacagaacccccatcctgttgtagattggctttgcaaggcgcataccgggctttagatcagcagttttgacaaattgcatgcttatctccccctcttccggtattgtcataccaaaatcctctttatcttccctctatgatagcatattgaaagctgaaatacaatctgatatgatactcttagaaccggggtttttgaaagaaaatcctacttttccggagaaagaggtacttatgatacagattccgtggagacgcgtggcgggagcggcgctggtgatgtgcctgcttctggcaaatacatcttatgccgagacgacacaggacaacataaatgatgcgaagaatcagattgaggatctgaaagatcagaaaaaggatgccgaggataccgtcaatgacatctccggcaaaaaggatgcactggagtcggatcttagcgggttaaacggtcagctttccgatattgtcgcacagatcaatgatctggaggggcagatttcggacaaacagggggagattgaccaggcgaaggaggatctggctgcggcggaggcacagtctgcgaaacagtatgaggatatgaagctgcggattcagttcatgtatgagaacggaagcacgccggtatggcagatgcttgcggaggcggaatctttttccgacttcctgaaccgcacggaatatattaccgacatcaacgcctacgacagaaaaaagcttgtggaataccaggatctgcaggagcagatagccgcccagaaggaagatctggagagtgatatgaccgagctggtggcgatgcaggatgacatgaagaaaaagcaggcgaacgtcagcagtctcatcaacaccaccaaggcgaatctggcgcagacacaggaagatctggcggatgcgcagtctaacgtcgcggacctggaggataagatcaaccagatggtcgagtacgagaagcagctggagatccagaaggcgaaggaggacgctgcgcgtctggcggcgattaaggagcaggagaaggaggatacctccaccgtggtctatgtgccgacggacagtgaccagtacctgcttggagcaatcatccagtgcgaggcgggcggagaatcctacgacgggaagcttgcggtcggaagcgttgtgataaaccgtgtgaagagttcgtattttccgaactctgtctcgggtgtgatttaccagagcggtcagttctcgccggtggcgagcggcagactggcgtatcgtctggaagcgggtgtggacggaagctgccttcaggcggcgcaggatgtgctaaacggcaatattacggtgggctgcctgtatttcagacagaataacggcatcatacagggaaccgtaattggaaaccatgtattctattagaagtgaaaaaagtgcggaaaaccgcagaatggcagcagggcgatttttgtgaaaagtacacaagaatcgctttgcttttgtttggaaaataaaatttgcatgataaatttttaacaaaaaaagactgtaaaacagacgtatagagggggaaaaaggagcgtaaagaaaactttagaaagatgaaaaaagaagaaagttattgcatttaagagtgaaatatggtagcatgaaaaagtattaaaaagctagtaaaaacgccgattatttaaaatgcaccttgtgaaaaaaagagggagaaacataaattttaactgcaaagttgaatttattttttttagcaaaaagattgttaaaaaattaacagcgtttttcggcaaaattatttttaaagaggaacaaattccccgtacatacggggttttgtgtgtaaaactgaaaggagaattcaaaatggcaaagaaagtagttttagcaggcgcatgccgtaccgctatcggcaagatgggtggagcactgagcaatactccggcagcagagctgggatcaatcgtaatcaaagaggcattgaacagagctggcgtgaagccggagcaggtagatgaagtattgatgggatgtgttatccaggcagcacagggacagaacgttgcacgtcaggcttccatcaaggcaggacttccgatcgaagtaccggcagttactctgaacgttgtatgtggttccggactgaaatgtgtcaatgaagcagctactatgattctggctggtcaggcagatatcgttgttgcaggtggtatggagaacatgtccatggctccttatgccatgacgaaggctcgttttggatatcgtatgaacaatgcgaccatcattgataccatggtaaacgatgcacttactgatgcattcaaccactatcacatgatgatcacagctgagaacgtatgtgagaagtatggtcttacaagagaagaactcgatgagttctctgcaaacagccagcagaagtgcgagaaggcaattgctgagggcaagttcgatgacgagatcgttccggttccggttaaggttaagaaagagaccgttatgttcgcaaaagatgagggaccgcgtcctggcacaacagctgagtcactgtccaagttaaaatgctgctccggcaaagagggcggactggtaaccgcaggtaacgcttccggtattaacgatggtgcagctgcaatcgttgttatgagcgaggagaaggcaaaagagcttggcgttaagccgatggcaacatgggtagccggagcactcggcggagtagagcctgagatcatgggtgtcggacctgttgcatctaccagaaaggtactcgagagaacaggacttaccatcgatgatatggatctgatcgaggcaaacgaggcattcgcagcacagtctgttgcagttgcaagagatctgaagtttgatatgtccaaggtaaacgtaaacggcggtgcaatcgcacttggtcacccggtaggagcttccggatgccgtatccttgttaccttattacatgagatgcagaagagagacgtaaagagaggtcttgctactctgtgcatcggtggtggtatgggatgctctaccatcgttgagagagactaatgcagttatgagaacttctgaaccggcgccagcctgtgggcggcaccggagaagttcttgctttgcgtaataggaatctttgttcctattttattaaaaggcatagaatcagttattagaatatatatatgatatttcaggaggtactgacatgaaagttggagttattggtgcaggaacaatgggacagggtattgcaaaagcatttgcccaggtagacggatatgaagtagcactctgcgacatcaagcaggagtgggctgacggcggaaaagagaagatcaagaaaggctatgcaagacttgtcgagaaaggaaaaatgacacaggaagcagtagacggcattctcgcaaagattaccccaggcttaaaggaagacctttgcaaggattgtgacctcatcgtagaggcggctttcgaggatatgggcgttaagaagactacattccaggagctggataagattgcaaagccagagtgcatttttgcatccaacacatccagcctttccatcacagagatcggcaacggattgacccgtccaatggtaggtatgcatttcttcaacccggcagaccgtatgaagttaatcgaggttatcgcaggtgtgaatacaccggaagagaccgttgaggcgatcaagaagatctctgtagagatcggcaagactccggtacaggtaaatgaggcagcaggcttcgttgtaaaccgtatcttaatcccgatgatcaatgaggcagctttcattaagatggaaggtgtatctgatatcgcaggcatcgatgcagcaatgaaactcggtgcaaaccatccgatgggaccgcttgagttaggtgatttcattggtctggatatctgccttgcaatcatggatgttctctacaaagagacaggcgacagcaagtaccgcgcatgcccgttaatccgcaagatggttcgcggcggcaatcttggcgcaaagagcggcaagggattctatgtatacaatgctgaccgtacaaagaccccggttgatgctcagtaaaatataaggtaataatggaggaaatgatatcatggatttcactttagacaagaaacatgaaatggcgcgctccctgttcagagagttcgctgagaacgaggtaaagcctctcgctcaggaagtagatgagacagaggaattcccggttgagaacgtgaagaagatgcagaagctcggcttcatgggcatcccggtaccgaaggagtacggcggacagggctgtgacccgctcacctatgtaatgtgcgtagaggaactgtccaaggtatgcgctacaacaggtgttattgtttctgcacatacttctctctgcatcgatccgattatgacctacggtacagaggatcagaagcagaaatacgttaagccgcttgcaacaggcgagaagctcggtgcattcgcactgactgagccgggtgcaggtaccgatgcgcagggcgcacagaccaaggctgtattagacggagacgagtgggtattaaacggctccaagtgcttcatcacaaatggtaaggttgcagatgtttacatcgtaatcgcaatcacaagcgtaacagaggataagagaggcagaaagaagaagaacttctctgcatttatcgtagataagggagctccgggcttctccttcggaaccaaggagaagaagatgggtatccgcggatcatctacatacgaactgatcttcgaggattgcagaatcccgaaggagaacctgcttggcgtagagggcaagggattcccgatcgctatgcacacactggatggcggacgtatcggtattgctgctcaggcacttggtatcgcagagggcgcattagaccgcgcaatcgcatacaccaaggagagaaagcagttcggccgtacgattgcccagcagcagaatacacagttcaagctggctgacatggctgcaagaattgaggctgcacagcttcttgtatacaaagctgctatggcaaaggcaacacagaaggtatattccgtagaggccgcaaaggcaaaactgttcgcagcagagactgctatggctgttaccacagaggttgtccagctgtttggtggatacggttacatcagagagtacgatgtagagcgtatgatgcgtgacgcaaagatcacagagatctacgagggaaccagtgaggttcagagaatggttatctctggtgcattactgaaatagtcgtaatccgtggcataatataaaaatataaggagtgaaaaatacatgaatatcgtagtatgtattaaacaggtaccagataccaagggcggcgttaagttcaacccggacggtacattagacagagctgcaatgcttaccatcatgaacccggatgacaaagcaggtcttgaggcagcacttagattaaaagagcagtacggcgcagaagtaaccgttcttaccatgggtcttccgaaggcagacgaggtgcttcgtgaggcaatggcaatgggcgcagacaaaggaatccttgtaacagatcgtgtgttaggcggagctgatacatgggctacctccaccacaatcgcaggcgcactccgcaatctggattacgatctgatcatcaccggacgtcaggcgatcgatggtgataccgctcaggtaggaccgcagatcgcagagcatctgggacttccggttatttcctacgcacaggacatcaagatcgatggagaatatgtcgttgttcagcgtcagtacgaggacagataccatgagttaaaggcaaagatgccgtgcctgatcacagcactttccgaactgaatcagccgcgttacatgactccgggcggaatcttcgacgcatacgataaggaagttaccgtatggggaagagcagatcttaaggatgtagatgattctgatcttggattaaagggatcaccgacaaagatcgcaaaggcatctgacaaggtacgtaagggcgcaggcgagaaggttgtccttgatccggatgagtccgtagcatacctgatcggcaagttcaaagagaagcacattatctaacaaatataaggaaaagtggtgaataaaatgggtttagaagaatataaaggagtatttgtctttgcacagcaggttgacaacgtattagacggcgttgctttcgagttacttggaaaaggaaaagagctggcaaaggatttaaacacagaagtaactgcagtattgattggctccggcgttaaggagctggcagatcagctcgctgagtacggcgctgacagagtcatcgtggtagacgatccgcagttaaaagactacagaacagagccgtacgcacatgcactggcatctgtgatcaatgagtacaagccggagatcatgctggttggcgcaactgcaatcggccgtgacctcggacctactgtttccgctcgtgtgaagacaggtcttactgctgactgtacgatgcttgagatcggcgatttcccgctgaacgcagcaccgggacaggagcagcagcacaatcagcttcttatgacacgtcctgcatttggtggtaacacgatcgcaacgatcgcgtgcccgtacaaccgtccgcagatggctactgtacgcccaggtgttatgcagaagatcgctccgattgcaggcgctaaggcaaatgtggtagagtacaatccgggattcaccccgaatgacagatatgtagagatcttaaacattgtaaaggctgttaagaatacagcgaatatcatggatgcaaagatcctggtatccggtggacgtggtgttggttccaaggagaacttcaagcttctcgaggatctggcagaggtacttggcggtaccgtaagctgctcccgtgccgtagtggagaacggctggctgccggtagatttacaggtaggacagacaggtaagacagtacgtccgcagatctacttcgcaatcggtatttcaggagctatccagcacgttgcaggtatggaggattctgatctcatcgttgctatcaacaaggatgaggatgcaccgatcttcgacgttgcagattatggtctggtaggagatctcaacaagatcgttccggcactgaccactgcgttaaaggcagaacttggcaaataagcaaagaaaagtacataggtgaaaagaactcccgcgtggcagatgtggcgtctgtcatgcgggagtttttatgtttttatttcacgagcttgacagttgccgttttgcgtattattgtcattccgaaggagtgaaagaacgtgagacagacagtaacagaaaatcgattattcagtaaaaaagatttgcggaaactgattattccgctgatcttagaacagacgcttgccatcaccgtgggaatggcagatacgatgatgatttcttctgcgggagaagcggcagtttccggcgtgtcgctggtagacatgtttaacaacttaatcatcagtgtgctggcggcgcttgcgaccggcggtgcggtggtaacgtcacagtgtatcggtgcgggaaggagagaggaagcctgccggtctgccagacagcttgtgtttacagaggcggcgatcacgatcggtatcagtgtactggtacttctttttcacaggcagatcctcggattattcttcggacagattgaggcggatgttatgcagaatgcgatcatctatctcattatctccgtgttctcatttccgcttctcgcagtgtatgactcgtgtgcggcgctgtaccgttcgatggggaatgcgcagatcacattgaaaatatcgctgctgatgaatgtcatcaacgttgtgggaaatgcaatcggcgtgtatgtgctgaaactgggagtagcgggagtcgccattccgtcgttggtttcccgcggtgtggcaggagtggtgctttttacgtttttgcataatccggacaatctggtctttctcaccagaggaaaatttaaagtggacgcaacgattgtgaagcggattctttttatcggcatcccgagcggaattgaaaacggtatcttccagctgggacgtgtgcttgtggtcagcatcatagctgcgttcggcaccagccagatcgcggcgaacggggtggcgaacagtctggattccatgggatgtattgtgggacaggcgatgagccttgcgatgattactgtgatcggacgttgtgtgggagccggagaagaaggacaggtgcgctattacaccaaaaagctgctgggagagacctatttttatacggcggtcatcaacagcatcattttacttctgctgccgtggattttacagatctatggactgggagaggagacgacgcgcctgtcctacattctggtcatgattcatgatggaatggcgatcttcctgtggccggcgtcgtttgtgctgccgaatatgctccgcgcctgcaacgatgtaaaatacacgatggtcgtgtcgattttttccatgattaccttccgcatcggtttcagctacctgtttggcgttcacatgggatggatggcagtcggggtgtgggctgccatggtaattgactgggtgttccgcgtactctgttttgtgggaagatatctggcgggaacctggcggaaaaaatgtggtcttgtggcgccaactgcttgataaatatttcacatagtgatatactgcaaaagatgcaaaaagttcctggcagacaggaaccataaacaaagtatacagaaaagaggaaaagactatgacgaagtcgaaattttctacgaagtatctcgtggagatggcgcttttggttgccatcatcttactcatggcttttaccccgattggttacataaagacagcaggtcttgagattaccctgattgtcataccagttgcggtaggagctgtaacattgggaccggcggcaggagcaatcttaggcggtgtgttcggtatcacgagttttatccagtgttttggaatgagcgcgtttggtacgctccttctgggcgtaaacccggtattcacatttctggtatgtgtgccgacacgtattctggacggatggctgaccggactgatctacaagggactgaagaagacgaaaataccttccgcaggttcggtaacgcttgccagcctttgctgtccgttgctgaacaccacattttttatgggaacactggtaaccctgttcgcaggaacaatgcgtgagcagttcggcatgacgaaagtgattccgtttatcgcagcatttgtcggcgtgaacggtgttgtcgaggcgatcgtatgtttcgttatcggaacagcggtttccatggcattgaaaaaagcactccgctactaggaataataaataatattatgagaagaaatacacttggggatttcatgtggaaatgcagctggaaattcggttcaaaaaatgtggatttctaaccagccgaatgtttgcatctttgatgatccgtgtctttccaagtttggagtactccgcgggtcatgtctgcatcccggaagacaatttgtaggacttttgtgtgtgtcccttattggcaccagacaacagatggcataaatgccacctttatgtcgaacaaaacataaccgcgcgaagccgatgtttgagacggcatctgccttattttcaatagcagatgccggcgagtttcggttcgcgcggttttatactgtctgtgaagaggtgccattagggacaccagaaagtccgcccattgtctccggtgtgtcggacatgcacccgtcggattttccaaacgtggaagagacacggaatccgatgcaaacattcagcaggaagaaatgcacacatttttctccaacgaatttccatttgtatttccatctgaaatcccacggtgtggtcttctcatattattacttatcacccaaacgatctatgcttattgcggcaattccttttttgtctgcaaaaaagaacacgagaaagcgggcgtcttcttggaaacatcgacaaaagagagtataatagtctgtgatgaataagaataaaggggtgaaagtgtgggagaacagcagagcaggaatattatggattatgacaccgtgcggctggatgatgagaacaatgcagtggtgatcatcgaccagacgaagctgccgggaaaaatagagatcatttcgcttcacacggcgcaggaaatctggaacgcgatctatctgcttcaggtgcgcggagcaccggcgatcggagtggcggcggcatatgggatctatgtgctggcaaaacggatggatacggaggattacgatacattttaccgtgagtttgtacggcagaaggagtatctggattcttcgcgcccgacagccgtgaacttaagctgggcgttaaaccggatgcagcgtgttgtggaggcacacagtggggagactgtagcgcagatcaaggaggcactgcaccgggagtctgtggcgatccaggaggaagatatctgggtgtgccggatgatcggagagcatggtctgactctggtaaagccgggggatggcattctgacgcactgcaatgcgggacagctcgccacaagcaaatatggcaccgcgacggcgccgatctatctgggagaggaacgcggttatcattttcgtgtatttgcggatgagaccagacccctgttgcagggcgccagactgacagcatttgaactgcagtcttccggggtggatgtcacattgatctgcgacaatatgtcggcgacagtcatgaagaacggctgggttaatgcggtatttgtcggctgtgaccgtgtggcggcgaacggagatgcggcgaataagatcggtacttctgtggtggcagcggtggcaaagtattacggtgtgccggtgtatatctgcgcgccgacgtcgacgatcgacttaaatacgccgaccggagctgagatcaagatcgagcagcgtccggcggaggaagtcacggaaatgtggtacaaggagcgcatggcaccggagggcatcaaggtcttcaatccggcatttgatgtgacggatcatgagctgattgcaggcatcgttaccgaatacggtgtggcgagagcgccttacacggagtcgctggcggcgatttttgcagaaaaggaaaagcgtgccagagagaaaaaagaagcctgatagagaagatgtaagcgatttaaggaggaaagaatatgccagagaacagtaattgcagcggagcatccagctgctcaaaggagagctgcgagggatgtccgagcaacgcgaagaataaagcaggcggcggaattgccaaggagccgatgaatgcggcatccaacgttaagaaagtgatcggtgttgtcagcggaaaaggcggcgtcggcaaatcatttgtcacagcatcactcgctgcagcgatgaaccgcgccggatacaaggtaggcatcatggatgcggatattaccggtccgtcgattcctaagatgttcggaattcatggacaggtatacggaacggacgacggaatggttccgatggagacggagaacggcatcaagatcatgtcgatcaacctgctgttggatgacgaggaggcacctgtcatctggagaggtccggtgattgccggcgtggtaaaacagttctggaacgagacagtctggggagacgtggactatctgttcgtggatatgccgcctggaaccggagatgtaccgcttacggtgttccagtcgcttccggtagacggaatcgtgattgtgacgtccccgcaggaactcgtgcagatgattgtgaaaaaggcgtacaacatggcggagatgatgcatgtgccggtgctcggtctggtggagaatttcagctacctgaaatgtccggactgcggaaaagagatcaagctgtttggcgagagtcatatcgacgatgtcgcaaaagagctcgggatcccggtattcggaaagcttccgcttgatccggcgtttgcggagcaggcagacaagggagcgtttgcaacgatggagaacgcttatctggatgcgggcgtagagaagttaaagacactttaatgtgacaggaacgggaaagtgttaccacttacccggagaaaatgacctcttggtgtaaaactgtttacaccgggaggttctttttttatactggaaccatcaaaggagttacagagatgaaaataaaaattgagattgacgagagcgccgcggaggatgaagtgattatccgctgccgcggtctgacgaaacaggtcgctgccgtgcagcgcgccgtgcgggatgtcaccaacgcttccgagaagatcctgctttataaagggaacacggaatactatgtgacattgtccaagattttgtttttcgagacagacgagaacgggatcagcgcacacacccgggatgaggtgtatcagacccggtacaaactatacgagctggaagatatgcttccgggcgtttttatgagagtatccaaatccacgatcttaaacacggatcagatttactctagtgaccgcaatctgacggcgtcgagtgtggtggcgtttttgaacacgcacaagaaggtctatgtatcgcggtattactataaaccgttgactcaaaaattagaagaaaagaggttgcatcatgaaaagtagcaaagtattctggggaatcttttttatcctcgcagcagtgtatgtcgttataagcaaatttggaattctgccggatatcggcgtgttcagcattattctgaccgtatttttcctctggctttttgtcgagggaatccgcaatgtgaatttctgggaaatcctgttctcaattgcgtttatctgtatcatatacgatgagccgcttggaattacggcactcacgccgtggacggtgctcggcgcggcattcctcggaagcatcggtctgtcactcattttcggcgggaaaaagcggaaatggaagacggtgaccggcaatgtcgggacatccagcagtgaacagtataccggcgaagagatccggtgtgagaacagcttcggttccgcaatccgctacatcaactccgacaacttcagacgcgccgccatcgaaaataatttcggatcgctttcggtgtacttcgacaatgcgatcgtgcaggaaggttctgcaaatgtgagtgtggagaataatttcggggagaccaacctttacatcccgaaagaatggaagattcagaataatctggaccgttcgttcggcgccatccgtgaaaccggcagcagcatcggaacgagcagcacggtgctgtatctgaatggctccgcgaacttcggagagattcatctgcactacatttaagaaataccgcggaaagtggaagcagcagggatcgcgggcatcatgtaaaaaggtttacagcgtttcagagtgcaaccggagacggtcattcttttgagcaaaatccctgtatttcttccacactgcgtttgacatcggattctgtgtcttggccacgttttgacaatccgcgggatgtgtccgtcacgccgcagacaatgagcggacttcctggtgcccctagcggcaccgcttcacagacaatataaaaccgcgcgaaccgaaactcgctggcatctgctattgaaaatagggcagatgccaactcagacatcggcttcgcgcggttatgttttgtttagcggtgtcgacaaggggcacacacgaaagcccttaaattgtctgcggagtgcggccacatttcgcggagtgctcaaaacttggaaagacacggatcatcgaggatgtcaaacgcggtgcggattagaaataccggattttgcgatcagaatgaccgtctccggttgcatcctgaaacgtcagaaaacttttacatcatccgggcactgttccctgccgcctccgcttttggcggtatgtttattcctctgtatctgcgtagctggtatcttcgtgaagattcggcttcatgtcaataccgcggttcgcgtcacctgtgatgtcttttccgaagtgatagtcgttgcccggcaggatggcatttaagaaaatacctgcgatcgctgcgactgccagcgcggtgagtgtgacggaggttccggcgatcgtaaaggtaagaccgtcggagaaaccaagaccgcacacgaagatcacgcctgcgatgatcagattgcgtgactgcgtaaaatccacatgattttccacaacattgcggacgccgatggcggagatcataccgtagagcatgaagctgacaccgccgatgatagcggacggcatggaaccgatcacagcagccatcttcggaataaagcttaagatgatggcgtagcaggctgcgatgcggatgacttttggatcgtacactttgctcagttcgagtacgccggtattttcaccgtaggtggtgtttgcgggaccgccgacgagggcggacagggaagtggcgagtccgtcgccgatcagggtgcggtggagtcccggatcctcgataaaattctgatcaaccgtcgcggagatggcggaaatatcgccaatgtgttccatcatggttgcgagtgcgatcggagccatgaccaaaatggcggacagattgaatttgcagagggaaaatgccggtacaccgacccaggaagcgtttgcgatgtcggtaaaagaaagaagggcagagccgtctgcgtttgtcatgcccatggcgttaaagatcaatgcggcaatataagaaataatgacgcccatcagaatcgggatgatcttaaacattcctctgccccagatattgaaaacgatgatcgtaaccagggcaatgagggcgagaagccagttggtggaagcattattgatggcggaaccggcaagactcaacccgatgcaaatgatgatcggaccggttacgaccggcggaagaaaacgcatgaccttcttgacgccgacgagcttgatgatcagcgcgagaatcagatataaaagcccagcgacaacaattccgccgcaggcataggaaagcttgtccgcgttggacatatcggcgaatacaccggaatccatgtttgcaatcgtggcaaaaccgccgaggaaggcaaaggaagaaccgagaaacgccggaaccttgaatttggaacatagatggaaaaataaagttccgataccggcacagatcaatgtaacctgtacatgtagaacatcttcgccgaagtagctgttgacaagaattggtacaagaatggttgcgccgaacatggcaaacatatgctgcaggccaagaatcagcatttttggtacgccaagtacgctggcgtcgcggattgctccgtctttttcgttcatagtaaactcctcctgatgtgaaatgattggtagttgcgtatatacaaatggcaaatcagaacttctgatttgccataagatatcaaaaaatagatccggtgaaacgtcttgcctcctgatcgtaatcacggacgggaatctggtccagttcgccggtaccgtcgagatagaaagtgagcagcgtctgcgtcatatagggactgatccagagagccgcaatgccaaaagagcagatggcaagcgcgccccagccgagaaagctgaataaaatgtaaagcagcttcctgcgtcgtccgcgcataaatttacggcaggtgcgaaaagcatcccgcacgcttaaatgcggatggtctaaaagaaagaagaaaaccatgcggtaggtaagcaacacacagaaagtaaaaatcagaccgaggatgcttccggcagcaagcagggcaccggagagatcggagacaccggttttataaaaataaagaacaccggcaatggcaggaatacctgcgatcaccagaaatacatcgaagagaacggcagcgagaaagaagcgctctgcgccattgcgaaacggtgtaaaaacatcacggatgcggtatgtctgaccgcgcgtcatattcatatgaaccagcataacgccggtgtctagcatctgggtgatcagaagaattaaaatatctgcaatcgtgctgatgataagctgcggagtgccgggataatcgccgagcgtcatggagaacggaatctcgatgagcgtcggaattaaggaggcagtcagaaatgctgccatcggtacggaataacggttatttaaaatgtcgcgtgaaatacgttttaattcgctggatgatcttgacatgtgtagactcctgtggatgtgatatttgtgtatggtttggtaaaggtttttgcgcttcggcaaaagtctggaaaaccttcggtttcccagactcgcgggcgcgttcacatgcaccgaagccgcccgcagctgcaagcatctgcattcggcttcgatacatgttcacttttgccttcgcgaacattatagcatggaagaccgtgatatgctactggcagttaaagagatttgaaatctgcggaaatggcatacgctttacaaccgaaaatgcggcggttataatagcagggagtaagataggaatggagatcggaatgtttcagacggatagacgggtagaccgggatttttatattatgggctggtgcgcggcgggaattttcgcggcgctgtttttgtttgtcagagtaacaggaattccggtctggaaatttttgctgccctgcccgtttcatgcgctgaccggagcgtactgccccgggtgcggcgggacaagagccgtcagggcgctgcttgccggcaaatggctgcgctcctttgtgctgcacccgtttgtgccgtatgcggcgctgcttagcggctggtttatgatcagccagaccattgaacgcctgagcggaagccggataaggattgccctgcgctttcgtgatgtctatatatggatcgccctgcttttgatcgtggtcaactgcctggtcaaaaatcttgccctgtttgtgtggcatgtggatttactggcctagggaattcatcagtgtatcaaaatcgatgccgagcgtgccgtatacctgacgcgccatattttccacgccgccataatataattcggcaatcgcaaatgtgtaaataatcatggcgaggacaatgcctagggcaatggcgccaaggatcagagcaattttcgcgcgggaggtcagcgtgcgctcgccgccccgggataaaagtgcaaaaacgatggcaagagatccgcagatcagtgccggatagaccagacaaaaagtagctgccccgatcacgccgagaagcagagcggcattttccattcgctgggaacgtcgtttgttgttcatgataatcagacctttcccgatatgccggtattgccagtatatcgcaggataactttgtctattgtaacatgggaaagccaaaaagacaatgaggaaggcacttgagattacagcggattttcggtatactgggagcagactcggtaaaatttggaggacagatatggatattattgcaaaaatttctgaggaactggggattaagcgccatcagacagaggcagcagtcaagctgatcgatgaaggcaataccattccttttattgcgcgttaccggaaggaggcgaccggcgcattaaacgatgaggtgcttcgtaacctgtcggagcgccttacctatttaagaggactggaggagcgcaaggagacggtgctcgccagcattgaggagcaggggaagctgacggacgaactgaaagcgcagatcctttcggcggagacgatggttctgctggaggatttataccgcccgtacaagccgaagcgcagaacgcgcgccacgatcgccaaggaaaagggactggaaccgcttgccggtgtgattacactgcagatgataaaaacgccgctcatagaagaggcggcaaaatacgtggatgccgaaaagggagttacaaccgccgaggaggcgattgcgggagcgtcggatattattgcggagtccatctctgacgaggcggattaccgtacgcacatccgtgacctcacggtgaaaaaaggccggatgacctctactgccaaagacccggagacggaatccgtctatgagatgtattacgattttgacgagccggtggcaaagcttgccggacaccggattctggcggtgaaccgcggagaaaaagaaaaattcctcaccgtgaagatcgaagcgccgcaggaggacattctgcgctatctggagaaaaaggtgattgtccgggacaacccgcagacgaatgaggtgctgcgcgatgtggtgagagacgcctatgaccgtctgattgcaccggcgatcgagcgggagatccggagtaacctgaccgagcgtgcggaggacggcgccatccgtgtattcggaaagaacttagagcagctgctgatgcagccgccgattgccggacaggtggtgctcggatgggatccggcgtttcggacaggctgtaagcttgctgtggtagatccgaccggaaaagtgcttgatacgacggtgatttatccgacggctccgcagaataaagtggcggaggcaaaagcggtattaaagaaattgattgccaaatatcacattaccctgatttcccttggaaacggaacggcatcgcgggaatccgaacagatcattgtggatctgttaaaggaacttccggtaaaagtacagtacattattgtcaatgaggcgggcgcgtcggtctattctgccagcaagcttgccacggaagaattcccgaattttgacgtgggacagcgaagcgcagcgtccatggcgcgccgtctgcaggatccgttggcggagcttgttaaaatcgatccgaagtccatcggtgtgggacagtatcagcatgacatgaaccagaaaaagctgggcgaagcacttggcggcgtggtcgaggactgtgtgaacaaagtcggcgtggatttgaatactgcatcggcatcgcttctggaatacgtctccggcatcagcaagacgctggcaaaaaatattgtaacctaccgcgaggaaaacggcagatttgtatcccgtgcaggacttttgaaggtgccgaagctgggaccgaaggcatatgaacagtgcgcaggattcctcaggatcggtgacggaaagaatccgctcgatgcgaccggtgtgcacccggagagctatgatgccacgaagaagcttctggagcggctggattatacgttatctgacgtaaaagagcggaaggtagagggcatttccaaaaagatccatgactacaaaaaactctcagaagaactgggtgtgggagagatgacgctgcaggacatcgtcaaggagctggagaagccggcgagagacccgagagaggacatgccaaagccgattctgcgcagcgatgtgcttgagatcaaagacctgacgccggggatgattctgaaaggaaccgtgcgcaacgtcattgattttggcgcgtttgtcgatattggcgttcatcaggacggactggtgcatatttcacagatgagcgacaagtttatcaagcacccgctcgaagttgtcagcgtcggggatattgtggaagtgaaagtattaagcgttgatccgaaaaagcagcgcatccagctgacgatgaagctgaacggatagagaaaaagggttgacagtatgcccatatgggcatacaatatagaagcaaaataaatataggaattcttcggggcagggtgatatgagttcacagagatggaagcatagattcccgaccgacggtgattctggcagacgccagatcagtccgtgagctgcagttgcagttgagccggtgtgaatccgggaccgacagtatagtctggatgagagaagagaagcatgttaggaggacctgcggcagcagggtcttaagaatgcagtttaacgccccggatgtagagatcatccggggctttttgtgtggcgggaataagcgctgctccgctgccggaatgcaatccgttgaaagacggctgacacgcgagaatacctcgaattcctgcagagaaaaggagacgagtcattatggacacaaacagtacaatcacaggtaggacaacaacaaacagtatttcgagcgttcgctacatgagcgtcacggcaatgctttccgcagtagcatttattttaatgttcctggatttttccgttccgtttatgccggctttcatcaagatggatctctcagagctcccggcactgatcggtgcattttccatgggaccggtatgcggcattctgatctgtctgatcaagaatgtgcttcatctgtttattacaacaaccggcggcgtcggtgagctttccaacttccttctgggcgtagcattcgtacttccggcaggattgatttaccgccacaaaaagagccgcagaagcgcattgattggatccctgctcggtgcggtgatcatgggtgtattttccgtggtatccaactacttcctggtatatccggtatactacaactttatgccggaagaagctgtgctcggcgcttatcaggtgatcgtaccatccgtgaagagcattctgcagtgcctggtgtgcttcaatatgccgtttaccatcgtgaagggactgttttccgtggtaatcacattcctggtatacaaacacatttcaccgattctgaaaggagcgaaccgctagaaaaggggctgtcttagacgacagccccttttcttttggaatgaaaaatgctatactagcttagatatagacaggagggactgttatgccgctaaagtttgatattacattgacagcagaagatatgtaccggtttaatatgtaccagacctactccggatttcacgggtggttttccattgcgttttccatcctgatttttgtggtggcaggagtgacccgcgggaagatcgaggcggcatacaccgcattatatattgtatttggcatcgtatttctggtctatcctccggtgagtctgtacctaaggtcgaagcgcacactggcaatgtccgaggtgctgcggggaacgctgcactatgaggtggacgaggaggggctgcacgtatcgcagaaggaagagagtgcgctgcttccgtgggagcagatctataaaatggtcgcgacgaagcacaacgttctggtgtacagcagccggatcaatgcctatgtcattccgagagcacagctgggggaaagctacgcggcactgcagacacaggctgcggcacatctgccggcgtaccgtttgaagatgaagtaaagaatggggattttaaaatatgacagaaaagatctatgaaacatattcgccggaagagacgcacgcgcttggaaaacgcctgggcgcggaggcaaagcccggcgacgtctatacgctggtgggagatctgggcgtcggaaagacagtcttcacacagggaattgcggaaggacttggcatcacggagccggtctccagtccgacctttacaatcgtgcaggtatatgaggagggcaggatgccgttttatcatttcgacgtttatcgcatcggggacatcgaggagatggatgagatcggctacgaggattatttctacggggatggtctgtgcatgatcgagtgggcgaatctgatcgaagagattctgccggagcggcgcagcgaagttactatagaaaaagatctggaaatgggatttgattatcgcagaattaccataagagagcatcaggaggacagaaaatgaaaatattaggattggacagttccggtctggtggcgagcgttgcaatcgcggaggatgacaaccttctgggagaatataccgtaaactataaaaagacacattcacagacccttcttcccatgctggatgaggtggcgcgcatgatcgaactggatctttcgagtatcgatgcaatcgcggttgcaggcggaccgggctcatttacgggacttcggattggttcggcgacggcaaaaggtctgggactcgcgctggagaagccgatcctcaatgtgccgacggtggacgcacttgcatacaatctggtgggacaccgggatatggtatgcccgcttatggacgcaagaagaaatcagacctataccggtttgtaccgttttgatggaaacgacatgcaggtgctgcgcggagagtgtgccgtgggaatcgatgagattgcggcggacatcaacagcagaggtgaggcggtcgtatttttgggagacggtgtaccggtttttaaggcatatctggaggagcagcttacggtgccgcattcctatgcgcccgcacatctgaacaagcagcgggccggcgcggttgctgtgcttggcatgcagtattacagagagggaaaaacggagagcgcggcggaacaccgcccggaatatctccggctgtcccaggcggaaagagagcgcaaggagcaggaagccgcaaaaggaaaggaaaacgtatgagtattatccggagcatgacagcggaagatgcggcgaaggtggcgtctctggaggcggagattttttcgcagccgtggagtgagaatgcttttttggattcgctttgtctgcccgacacgatctttctggtggcagaggaatcgggtgtcatacaggggtacatcggaatgtatcttgcggccgatgagggtgagatcacaaatgtggctgtgaatcctgcgtgccgcaggcgtggaatcggggaagggctgctcacagagatgaaaaaacgtgccgcagaccacaagattgcccgcattgtccttgaagtgcgcgtgtcgaatgagggggcgatccgtttgtacgagaagcagggattttcctcggtgggtatccgccgggggttttatgaattcccgagagaagatgccagaattatggtctgtgccctgtaattccctgtgggattgcacggcggctcaatgatataatgaatcctgacggattcatattagaagttcctaaggaatttcggatgcgcagaaaacagcgtgaaacagacgatagaatggagaatatatcaatgagcagacgaaacggagtgatttattgcaaccgctgcggcagcccgatctgcacggagaaagaagccgggaaaagttccttccttactatttgtaaagagtggggctatttttccagacacaaagacggaacggtgcacaggatggatctgtgcgaaccgtgttatgacgcctgggtgcggacatttgctatcgcgccggaggtggaacaaaagacagaactgatatagcgataaaggagtttattcatgttagatgtatgcctattgggaacaggaggaatgatgccgctgccccgccgttttctgacggcggctatgctgcgttacaacggcagcagtctgctgattgattgcggcgagggaacacaggtggcgatcaaggaaaagggactgacgtttaagcccattgatgtcatctgttttacccattaccacggagatcacatcggcggactgccgggactgcttctcaccatgggaaatgcggacagaaccgagccgctgaccatgatcggtccgcgggggctggagcgggtggtgaacgcgctccgggtgattgctccggaacttccgtttgaaatacgttttattgagattacggaaccggaaatgcggctggaactcaatggatactgtatacatgcatttcgtgtcaatcataatgttacctgttacggttattcggtcgaaataaaacgtgcagggaagtttgacgtggagagagcgcgtgcggcggcaattccgcagaaatactggagccgtctgcagaagggagagatcctgtccggggaagacggaacggtctatacgccggagatggtgctcggaccagccagacgcggcatcaagatgacgtactgcacggacaccagaccgacagaatcgatcgtggcagcggcggagggatcggatctttttatctgcgagggaatgtatgcggagccggagaagctcgtcaaggcgaagcagtacaaacacatgacattctatgaggcagcagacatggcgaagagagccggcgtcagggaaatgtggctgacccattactccccgtctctggtgcacgcggagaactatctgccccaggtgcgtgagattttcccggatgcgtttttgggaaaagacgggaaaaacgtggaattgatgtttgaggatgaggactaaagaaaaagggaggttgtcataatgaagaagagtggcgtgattaaggcagtgataacaatactgatcattttactgatcgtgggcgtgtattacttttttacgacacagagacggacatcggtggaagatacggtggagctgacagagatacaaaagctcatcacgaagaatctggataccaactatccggcaactccgcgtgaggttgtgaagtattacaaccgtattctggagtgcttctatgatgatacctatacggacgatgaactggagtcgctggcggatcaggcgagaaagctgctggacgacgaactgttggagaacaatccgcgggatcagtatctttccgacctgaaagcggatattgaagattaccacaacaaatcaaaaacgattcgcagcagcaatgtctgcgacagcaatgatgtggtgtatcagacggtggacgggagagagtgcgcttatgtgacggcgtcttattttatgaatgagaacaacagcttcgaccgtaccaacgaaatgtatgttttgagaaaagatgacgatggagactggaagattctggtattctatcaggtggagggagattcttccgatgaacagtaatgagataaaaatattggcgattgaaagctcgtgcgatgagacggcagcagcggttgtcgtgaatggaagggatgtcagatcaaatgtgatatcctcccagattgcattgcataccttgtatggtggcgttgttccggagattgcctcgcgcaaacacattgaaaaaatcaatcaggtgattggacaggcactttcggatgcggggatgacgctggatgatatggatgcgatcggtgtcacctacggcccggggcttgttggagcactgcttgtcggagtggcggaggcaaaagccatcagctatgctaaaaagctgccactggtgggtgtgcatcatatcgaggggcacatcagcgccaattacatagagaacaaagatctggagccgccttttctatgcctggtggtgtccggcggacatacacatcttgtcaaggtgcttgattatggaaaatacgagatccttggaaaaacgagggacgacgcggcgggagaggcttttgacaaagtggcgcgtgccattggactcggctatccgggtggaccgaagattgaaaaagtggcgcatgaggggaatccgcatgcggtagagttcccgcgcgccaaaatcgtggacggcccgtatgacttcagcttcagcggcttgaagtctgcggtgctcaactatttaaacggttgtaaaatgaagaacattccgatcgtacaggcggatattgcggcgtccttccagaaagcggtgacggacgtgctgatcggaaatgccatgaaagcgattgatgaattcggaatggacaaatttgcgattgcgggtggagttgcgtccaacggcaccctgcgtgagggaatgcgtgcggcgtgcgagaagaagggcgtggcattttatcatccgtcgccgattttctgcaccgataatgcggcgatgatcggtgtggcggcatattatgatttcatgcgcggtcagagggacggactggatctgaatgcggtcccgaatctgaagctgggggagcgatagtggaaaaaataacagcagtggtacttgcagccggggcgggaaaacggatgcacagtgatgtgcacaagcagtatatgatgcttgccggccgcccggtgcttttttatgcgctgcaggcgtttgcagagagcgcggtaaccgacattgtcgtcgtagtgggggcaggagagatcgattactgcagaaaagagattgttgaaaaatatcatatccaaaaggtctgtgcggtcgtggaaggcggacgggaacgctaccattctgtgtatgaagggcttaaggcggcggacgggagtgattacgtgctgatccatgacggggcgagaccgcttgttaccgccgatatcatcagccggtccatagcgtgcgtcagagagggggattcctgcgtggtgggaatgccagtaaaggacacgatcaaagtggtcggggcggatggctttgcaaaagagacgcccgagcggagcagcctgtggcaggttcagaccccgcagacatttccctacggacggatccggaaggcgtatgagaaggtgatggcacagggagattctgccgtcacagatgatgcgatgatgctggagactgcatttggagagcaggttcgtgtgattgagggaagttatcagaacctaaaaatcacgacgcctgaagacattatggcagcggaattatacttaaatagaaaaagtgaaaaaaagtgttgacattggtggaagcagatggtaatattatttctgcactgatttgagacaagaacacggagaggtatcgaagtggtcataacgaggcggtcttgaaaaccgtttgtccgaaagggcgcatgggttcgaatcccatcctctccgcttatcaacacagacgataccgactccggtaacagaagtgctgatacaattttatatcattattttattcggagaagtacccaagctggccgaagggacacccctggaaagggtgcaggtcgttaatagcggcgcgagggttcaaatccctccttctccgctcgcttgatagacatattttctgagttgttgaaacaattcaaaaaaagtcgaaaaaagttgttgacaaaacagtcgacacgagatatactaatcaagctgattgcgaatcggaaacgaaacgcgaacaaccgcttcgaaagaagcgaaagaaaaataaaaaagttgttgacaaacggttgacggtatgatataataaataagctgtcgccgagagacgacaacagcgagtgaggttgaaaaatccgttcggaagttgcggagcaacttctaaagtcaatacgaagtattgacgatgtacattgataactgaacagtgaataaaccttgaaagatcctaaatttcaagctgtcgatcaagagattgaaagacagaatcaggcctatttcttatgcaaaaaaatcaaaaattgtgttgacatctcttaacaggtctaaaaagtccgcccattgtctccggtgtgtcggacatgcacccgtcggattgtccaaacgtggaagagacacgaaatccgatgcagacattcagccggaagaaatgctcacatttttctccaacgaatttccctctgcattttcatctgaaatcccacggtgtgatcttctaataatattactaattacccaaaagaattctatgcttattatgacaattccttctgttttctaatcgtgccgttcctcatcacacgcataggtctcacaaaatcttcccgaaaatgccggaaactcaccacccgcatacaggtgtgaggtatctccgaacccgcagacgcggaaagatgccacgccgggacggcgctcctcggtatacaccgtggtgacggacgtcggcgccgcgcaggtataatgccacagaatcatcggtgacacattcatcaggtgcgacagcagcacacactccagaccgaagtggcagaagaacacaagcgtatcgcagttcgcctttgcgacgcggtagatgtcgccctcgcgcacatagccgtgctccgccagcagggcatcaaaatttgataccacccagccatactctgcacctacgccaacgtccggtttcttttgcacacggatgccgtttccctcatgcgctccgggagccagtccctcacgcatagcctgctgcgtcgcccacaggtcgcgccggaagaactcctcttctctcgtccagtcctccggcagccagtcccaggcgatcgacttttgatccgggcaatccggtcggtcgatcttcgtgtcgaactccctgagccacagacattcctttgcctcgcggttcatcttctgtaacgtcagggacgccgtatccttcgcccgcccgagcggcgacacatagaactccttaacaggaagctttgacaggcgttctgacaaaagctctgcctcgcgccagcccttttctgtcagggtatcatgctcataatccggatccccgtgccgtacaatcaataatctcatactgccgcaaatgcctccgcaagatcttcaataatatcgtccacattctctgttccaatcgacagacggatggtgttcggcttgatgccctgctctaacagttcctccgtcgtgagctgggaatgtgtcgtggatgccggatgaatcacgagcgacttcacatccgccacattggcaagcaaggagaacagctccagatgatcgatgaagtcttttgcggtctgctcgtctcccttgatctcgaacgtaaagatcgaaccgccgccgttcgggaaatattttttgtagagtgcctgctgcgccggatcctccgataccgacggatgatgcaccttctccaccttcgggttgttgttcaaatattctacgacctttaatgcattctccacatggcgctccacacgcagcgacagtgtctcaagtccctgtaaaaacaggaaagaatggaacggagagatggttgcaccggtgtcgcgcagtaaaatggcgcggatctttgtgacgaacgctgccggtcctgccgcctttgtaaagctgatgccgtggtaactcgggttcggctccgtcaaagacgggaacttgccgcttgcctcccagtcaaaccttccgccgtccacgatcacgccgccgatggctgttccgtgtccgccgatgaacttggttgccgagtgaacgacaatatctgctccgtactcaagcgggcggaccagatacggcgttgcaaaagtgttgtccacaaccagcggaatctgatgcgcatgcgcgatcgctgcgatcttctcaatatccacaacgtccgagttcgggttgccgagcgtctcaatgtggatcgctctggtgttctcctggattgcctgctccacctcgtcgtaattgaatggatcgacgaaagttgtcgtgataccatactccgggaatgtatgtgccaatagattgtaggtgccgccgtagatgttgttggcagccacgatgtgctcgccagcatgcgccagattctgaagtgtataggcgatcgccgccgcaccggacgccacggcaagcgctgccacaccgccctccaaagctgcgattctctgctcgaagacatcctcggtcgggtttgttaatctgccatagatatttcccgcatcggtcagtccgaaacgcgccgccgcatgctcactgttgttaaatacataagaagatgtctggtaaatcggcactgctctcgctccggtcaccggatctgcctcctcctgtcctacgtgaagctgtaatgtctcaaattttaactttctgtcctttaatgcttttcccatgttatgtttctccttttattttcattttggaagttctgtctgttgataatctgatgataacatgagaaaaccaacctgtctaatatgaaaaaaaaagcaccagttataggttattcctatagctggtgttttctaatctaatcctcttttttaaagattgcattgcgcacttttgcgagtgcattcaaaagaatcgttccaagcacacagcagcagatgatctctcccgctccgacggtcagcatgtaaaacggaatcgaccagtctcttccgccatattccatggtaagtccatatccgtagcggagtaccagcggaatgatgatgatatttgataccaccggcgcgagcgtgcataaaaacttgtgcttgcggagcagatacgttccgactgcgccgagcagcgtcgccagactgccgaagatcacatcatagatggctgctcccgtcagaaggttggcaagcaggcatcccacaaacagtcccggaattgccgccggtgtaaagtacggcagaatggtcagcgcctcggaaatccggacctgaatggctcccgatgccaggttgaacgcactgataaaataggtcagcacgacatagattgctgcaatcatcgcagcgtgcacaatgaattgtaccttagagtttctcatattctgttctcctttagttttgttttacgagtggaaggtctcgaacactcgattcatttaacgccggaaatcggcggcaagcccgcttagaccttgtttttatgggctacgcaacgtctgacattttatcacagtctgccaaaaaaggcaacggcaaaatttctcccgtaaaatttttcacgcaaaaaactgctccgcgagcgtaatgctcccaatataaaccaccggtcctgtcatgtcaattctgctgtcccaggcaaattccaccagaagctccccgccgtgcatatgcaccgtcacacggtcgccgacaaatcccatcttgtgcgatgcggcagccgctgcacaggctcctgttcccgacgcgtatgtataacccgcgccgcgctcatagatctcgatctgaatattttcccggtcgagcacctgacagagctgcatgttgatacggttcggaaaatatctggaattttccacatacgggccaagctgcatcgcttttttctggctgacctcctcgagcatcagcacacaatttggatttcccagggagacgcaggtcgcgttatagaaattatcgccaaaaaagatcgcctcgttgacaatctccccatcaaacccgaccaccgggatttcctttgccacaaactccgggtatcccatgtccacgcgcatgagatcgccctgctcgtttaaaaacgtcaccctggtctcacccgcttttgtgtgcagcacatagctctcctctgtcacataccccatatcttttaaatatttggaaaaaatgcggataccgtttccgctcttctccgcctcactcccgtccgggttgaaaatgcgcacccgcattttgtccccatcaaaaaaagggccatagagaatgccgtctgctccgactcccaaattgcgccggcaaagtgcttccacctgcctttcctgcaattcacatgcattgcgattcggatcgtagatcaaataatcattccccagcccatggtatttacgcagtgttatctctgccataaatgtctccggtatctgttcttattctattatatgctgtattggcgcggatgccatctcttcagggatatcctgctcctcttccgtctgcttgttctgctcgatcaggctgcggatcgcctccgtcttctcatgaagaatcttgtcgatctgcccttttgtcacctcatcggtcacttcctcattgccgtaattcgccgagctgactgtcagctccggctccacaggaagctgctgcccggtaaccgcatcctctttctccccggtctgttcttcctttggctccgcatacggtgtcggtatataattcacattccagtattttacaatactgcggtgcatccgttcctgcttgtctctctcatcgattctatccaacatatactgtcgacctgccccacttattttctaatttatttatactacaaattctgccgtacttccataacattttgcatttcctgctgaaaattttctgtataaaaacgccccgaatgaagcatgctttttaacagaaaatcaaaccggaggaaacgcatcatgtcttcatacaaagttgaaatctgcggtgtcaacaccgcgaagctgcctgttttaaaagaagaggaaaaggacgcgctcttcgcccgcatcaaacagggagatgccgctgcccgcgaaacttacatcaagggaaacctccgcctcgtcttaagtgtaatcaagcgcttttccgggaaccacgagaacgtagatgatctctttcagatcggatgcatcggtctgatcaaatccatcgacaacttcaatcctgcactgggcgtaaagttctccacctatgcggttccgatgatcatcggtgaaatccgccggtatctgcgtgacaacaactcgatccgcgtcagccgttccctgcgcgacaccgcctacaaagccatccacacccgcgagattcttgccaaaacctcctgcaaggaaccgacattagaagagattgcaaaagtctccggtctcacccaggaggagatcgtcttcgccctggatgccatccagagccctgtcagcctctacgatccggtctataccgacggaggagacaccctctacgtcatggaccagatcagtgacaaaaaaaaccgcgaggacaactggatcgaagaactctctctaaacgacgccatgaatcatctgaacgagcgcgagaacttcatcctgcgcctccgattttacgagggaaagacacagatggaagtcgccgaggagattcacatctcccaggcacaggtcagccgtcttgaaaaatccgccttaaaatccatccgcacttatctctccatgtaatgcctaccgctcccacttgttgcagagttcattgatctgatccgcaaatttgccaagctcgcggttcggcataccttcgcacttgcggatcaccgtcatcagccgctcgccggctgccacaagtcttgcaaaaatattgttgactgcgcgggtactcttcttctccaccgcctctctggagccctgtgccacacaggcgcctgtcagcagatcaaacgcatcaccgctgaagggcgcgtaagcctccagccccagctcctcgtgaatatgcgccgcaaactgctccgtcaccttgtcttcgccatgtacgataaaaacgcgcttcggcttcgggtcaaacatgctcacccatttagtcagctgattcacgtccgcgtggccgctgattcccggaaggttctcgatcttcgcctgcacctcgatcgtctcgccgaagagcttcacttccttcgccccgtttaacagcgcattgccgagcgtacccggaacctgatatccgacaaacaggatcgtggaatcctttctccaaagattgtgcttcagatgatgccggatccgccccgcctcgcacatgccggacgcagagagaatgaccttcggcttgtcattgaaattgatcatcttcgactcgtcgctggtgatcgccatccgaagccccggaaaaccgatcgggttgatgccctgctgcacaagcgcgagcgcggtgtcatcaaagcagtcctgcacattcttgccaaaaatcgtggtggcttccaccgcgagcggactgtccacatacacctcaaaattctggaattccggaagcagattctccgtcttgatccgccggataaaatacagcatctcctgcgtacgtcccaccgagaacgccggtatgaccagattgccgcctctcgtaaacgtatcgcggatcacgcgggcaagctccacggcataatccggcggtgtctcatgcgtgcggtcaccgtacgtcgactccatgaccacgtaatccgccgatgtaggatactccggatccttgatgagcgggcggttccccggtccgatgtctccggaaaatacgatcttgcgctcctccacaccctcagcagtgttctcagagatccacatctcaatactggaagatccaagcagatgccccgcatccacaaaccggacttttaagccctcacagacgttgatcacgctgtggtagtcgcaggatacaaaatgtcccagaacccccaccgcatcattcatatcgtagagcggtacgacctccggcctgccggcacgcttcgccttgcggttcttccactccgcctcaaacatctggatatgtgcgctgtccttgagcataatctcacacagctgatgtgtcgctgtcgtcgtaaaaatctgcccgcggaagccatggttatataacatcggaagcagaccggaatgatcgatgtgcgcatgcgtcacaaacacatagtcgatcgtcgacgcgttcaccggtatctcctgattgacatacagatccggtccctgttccataccgcagtccaccagtacatgcttatccgcaaactccagataatgacagcttcctgtcacctcatgtgcagcccccaaaaattcaagcttcatatgcattccccccagcattttcttgataagaccattatacacgcaatgtcctgcggttacaattcttttcccttgtctcttttttcacaatcccgggcggcactactcaaagcgcacaatttctttcttcaggcgtcccatgatttttttctcaagacgcgatatgtaagactgggaaatccccagcatatccgccacctctttctgcgttttctcctcccctcccgccgtgttcaacccgaagcgcaattctatgatcatgcgctccctgccggtcagtccggcgatcgccgtcatcagcagcgtgcgctccacatccgtctcaatatcccggtagatcacatcctcatccgttcctaaaatatccgacaacagcaattcgtttccatcccagtccacatttaacggctcgtcgatggacacctccagcctggtcttgctgttcctgcgcagatacatcagaatctcattttcgatacagcgcgatgcataggttgccagcttgatgtttttatccggattgaacgtattgatcgctttgatgagacctatagtaccgatcgagatcagatcctccacgccgactcccgtattgtcgaacttttttgcaatatataccaccaaccgcaggttgtgttcaatcagttttctccgcgcctcctccgccgcatctgtggcaagcatccggatgcacacgctctcctcccctgcatccagcggcggcggcagcacctccgcgccgccgatatagtgcacctcatcattctccccgaacaaaaagcgtccgattccgttcaaaattccccgcatcccgtaatccgggaccatccattttatgtacatgtaagctcctttcttcactgtcatcccagggatgcatgcagaatcaggtcatattctttgtcctcaagcaaccccttctgtgcgattccaaccgccatatgttcataccgccgcatctgcctgccatcctgcagtatcatctcatccacatccatcaccgcaagaagtccgtcctctgctccaagagcacggtacggcacaaaccggattctgtcttttgtctgatccacaaatttttccgccaggctatagctcaaaatacagatcggctgcccggtatagggatctcttaactggttcccgctgtcccagtaggcgcttaacgccatccggcgcgcatcttttccaagccatgcccggcgcacatggctgccaaaggctcttcttctcccaagataccgaagaagaccgcacgttaccgtcactgcagccgcaatcgccactcctctgctttttgataaaataccgctctcctgcagccactcaaacgccccgccgagcagaagaaccaccagatacaccgccaaccagttctcaaagaactgcctcctgtcacacctcccgaaacagatgactgtcatcagtgtgttgatgagaaaatgcatgagcaggcagtacagcagataattgcggcaaagcaggatgcagcacagcccgagcactgcggaaacagccgccccaagcagcagccaccgcattttcctgcatctcttcaaaaaaagatttgcccctgcaacggcaaggaaatccatgagaaaattctggatcaaaaatacgtctgcataaaatacatatatttcctttcacctcggtttttctctgacatgccacctattatacgatgccgccgtctccttttttgtcaaaagtccgctctataatgcggcgagtcatctgcccggttcgacataatcttcctgtaacacaaaaactgccatgtgcaagtcctgtaatcggactgacacatggcagttcatattatgtcactgtaattctatttgcgtgaattcttcaggaaatccggaattttgatgtccatctgctgcaccgtgctctccggctgacgcggtctctggatacccggcagaggcggtgttactgtaccatgtcctccctgcggctgataggtcggagcagcggttcctgtggttcttccgagtgtggaaccggataccggtctgttcggtgtctgcgttgcataattcaacttcggcatgatcttgctcgttgcgcccggattctcaagtcctgtcgcaatgacggtgatcgtagcctcatcggtcatggactcatcgtacttcgcaccgaagatgatgttggcattgtcgcctgcgagatcctgtacatagcttgccgcatcattcgcatccataagagaaatatcaccggaaatattgatgatgacgtgggtagcaccgttgatggttgtctcaagcagcgggctggcaactgcaagcttgactgcctcgatcgccttgtcgtctcccttggcattaccgataccgatgtgagccatacccttgtccttcatgacggtagacacatctgcgaaatcgaggttgatgagtgccggcaggttgattaagtctgtaataccctgtactgcctgctgcaatacctcgtccgccttcttcaatgcatccggcatcgtggtacgtctgtccacgatctcaagaagcttgtcattcggtatcacaattaaagtatcaacgctctctttcaagcggtcgataccggaaagcgcattgaccatacgctgttttgcctcgaacttaaacggctttgtcacaactccgaccgtcagaatcccctgctcttttgcgatcttcgctacaaccggcgctgcgcctgtaccggtaccgccgcccataccacaggtaacgaataccatgtcggcgcccttcactgccgaggagagctcttccatactctcttccgctgccttctcgccgatctccggctgtgctccggctccaagtcccttcgtcagcttctcgccaatctggattaaggtcggtgccttgcaaagtgtaagtgcctgcttatccgtgttgatcccgataaactccactccaccgatattttcatcaatcattctatttacagcattgttaccagctcctccaactccgatgactataatcttcgcactggtatctgcttctgtcgtcataatctctagcaaggtagttcctccttcattctctcccataattcatgtcctgtggtaaacggatgtaaacacaccatctatcagagaatcatccggtgctcctcttcctacaccgtctgttctgtatatcgtctttcaatgcagtgcagaatccatactgcccgcttataaactcatatacaatataatatattctttctttcaatttatcaactaattttttcacttttttgaacaaattaaggattttctaatctctgtcaaacacaatatctgtggtgtccggtgtccatgtgtccagatgaagtgttccgtacattcccgcaagctgtggaaggatcgccgacagacgcacaatcttctgcgacagatagtcgtccgaaccgatcgaaacctgtatgccatagtaggtcagcgtcggttttaagctgctgtcgtagtgaatctcctgcggcagaaggtcgtattttttcaaaatctgcgtcaggctcagaaggttgtttagcacatccggctgatccagcggcagtttctcgtagagcacgacctcatcgcatgtcactccggtgatctttggtacatcctcaatctcgtccgaagaagtctccacgacgaatccatccttgtcaaaataggcgtactgcccgatggcgtcaatataaaagcagcccagaattcctttttcgtataccaggacatgcactgtatgcggatcatccagcgtcacttccatcgtgtcaacaaaaggcaccttgccggtatccttgatgcggtatttcagaagaacatacagagaattccacgaatactcatcatttaacaccagctgctcgatctgctcggaagaatagagctcattcccctccaccacgacgttttccaccgtgaatactttccagacgatcagaaatgcaatcgccaaaagcatcagaaggatcagtacaaccgtcagtccgattttccgtcttcttttcttttttctctgttctctaatcatactttaggtaacctcaaactttattccccttgacacggacagcgcaagccccatttccgagagcagaaacagaatggaggttccaccgtaactgacaaacggaagggaaatcccggtattcggaatggtgttggtcacaacggcaatattcaaaaccacctggatggaaatatgcgccatgatgccgaccacaagcagcgccccgtagagatctgctgcattgttcgctatcaccataaatctccagattatcagcaggtataaaaggatcaggcagatcgcgccgaaaagtcccagttcctcacagatgacggagaagatcatatcgttctgcgcctccgggataaaaccgagcttctgcatgctctccccgagtcccttgccgaacagcccgccggaaccgatcgcatagagtccctgcagcgtctgataacctttttcatactcttccgggtgcagccagatctggatacgctcggcgcggtaggatgcaagcgcgataaaaataacgccgactgcgagtaccacgcctcccacaatcaggaaatgcgaatatttcgggctcgccacaaacagcatgcacaccgcgatgccaaggataataatcgctgtacttaagttattgtatgcgaccaccccgacgacgggaagcacgatcgccatgaccttgaccagcgtcttaaaatcccccacctgcttcgacgtcttatagatgatcgtcgccaggaaaatgatgaccgcaagcttcgcaaactcggatggctggaacgaaagcggtccgatgtagatccagcgcgcctgtcctttggcttccgtaccgataaagataaccgccgtacacagtccgaacgccatcagatacgccagaccgctcactctcatccagaaccggtacgggattctcgagacgatgatcatcgctatgattccaaggcttgtcgcaaacagctgctttttcagataatacgccgtatccccgaaacgcgtggagccatagtaagagctcgtgctgtagagcatcaccagaccgaaacaaagcagaaagataatcaaaaacagcaggctgtaatcaaaatatcgaattggtttttgttttttttctttttcctgccttcgcgccattctccactcctagtcttcttttaaggcacgcacatattccttgaaaatgcgtccgcgctcctcatagtttttaaacattccccagcttgcacatgcaggggataagagtaccgcatcaccggataccgcgttccggtagcaggtgtcgatcgcctcctcaaacgtatcacagagcacaatattctcaaatccatgtgcccgcgcacaggctgcaatcttctcccgcgtctgtccgatcagcacgagcagcttgacttttccgccaaagctttcaatccactcgtcatactccgactgcttatcatagccgccgccaatcagaagggtcggacggttcatggcacaaatgcccttgatcgcggcatccgggttggtgcccttagagtcgttataaaacttcacgccgcgcttctccgtcacatactcgatgcggtgctcgactgcctgaaaacgcttcagcacttcgacaatcttatccatcggaacaccgaggcttaacgccatgccggtcgcagccatcacattctcgtaattgtgcgttcccaaaatattgagttcattcacgttgatgaccttcgtggtgttctctccgtctgcatagtaaatatcctcgccgtccagatacagtccgcggtctaacttctgtctgctggaaaaatacagcacgttcgtgtgaagcgtctcaccgaatgcgcgcaggacttcatcctcgtaattgagcacgcagacctcgtcttccgtctgattctccgcgatccgctccttcgtcttaatatagcactccatcgtgtgatgacggttcagatgatccggcgtgatatttaaaatagcggaaactgccgggtgaaatgtgtgaatggtctccagctgaaagctgctgatctccgccaccgtcactgtctcgtccgtggtgtccgcagccacggaggtatatggaattccgatattgccgaccactttcacatcccggtaatagtttgccatgatctcgccgcagagcgccgtggtcgtcgtcttgccgttggtcccggtgatcgccacgatccgtcccttcgcaaaatggcaggcaagctcgatctcgccccagatcggaatcccgtcttttttcagatcctcaaccatcggaagatccgtcggcactcccgggcttaatacgacaagatccagtccgcttctatcttccgctgtcagttctccgaggatgatcttcacatccgcaaagaccgggtgcttctcacgaagcgccgtaagatccagctccttatttccgtcaaacaataccacattcacattcttctttttcagaagttccgtcgcggcaacaccgctgattccggaaccaaccacaagcactgtcttacctgtcagatccatgttcttcctcctataatcctaacagggcgatcatgcataagatcgccgttgtaatcgaaaatactgcaaccactctcgtctcggaccatccgcccagctcaaaatgatgatggatcggcgccatacggaaaatccgctttccgccggtctttttaaagtaggtcacctggatgatgacggagagtacctcgaccagatagatcagtccgacaatcacgataaacaaaggcatctgcatcatataggctgccgagaccacaaatccgccgagcgccagtgatccggtatctcccatgaaaacacttgccggatagacattaaacagcaaaaatccaagcagcgcacccacaaccgcacaggtgatcggcgcaatgcctgcattcgttccgatcgccaccgcggagaagaacgttgccaccatgatggtgacgctcgacgcgaggccgtccagaccatcggtaaagttcgtaccgttgacggttccgatgaccgccagatacagtaccgggaacgctccccagccgaggtctaaatattttcctccggagaacggaatcagcatggtgagcgggacatccgagtagcatcccatataaactgcgaacacggtcgtcaccacaatctgacagagcattttctgccatgcaagcagtccgtccgatctgcgcagcacaaccttcagataatcatccagaaagccgatcacaccaaatccgacggtcataaacagaatcggaacaatcttcggataatcttttacataaaacaccgatgtgatgataatacttgccaatatcataagtccgcccatcgtaggcgttccgtttttcttcagatgggattccagttccttccgctccgtctgtccgactttgagtcttcgcaggaaaggaattacaatcggtcccaacaatgcactgattgcaaaagatacgattaccgggattacaatttcatacgtcataataaacacctcatgtattttatctttgccgaaagcaacatgtgctttttaacccaactagtatacgttatttttcatgatttatcaaggtaaggcaatatgttttccataatttcttttacgaccggcgccgcaatcagacctccgtaatacgtgcccttcgggttattgataatcgcaatcacaagcactttgggatcgtccgcaggagcaaatccgaggaacgaggaaatatagcggtgctcgcttctcggcagtgtctgggaagtcgcagtcttgccgccgatcgcatacccctcgatcttcgcattctttccgcctccctccgacaccactttttccagcagatactgcatggtttccgaggtctccccgctgcagatctcctctctcttatcataagaaaatgtctcgaccaacgttccgtccgtttcacggacctccactccgaagtgcggtgtgatgcgcgttcccccatttataatagaagaaacggtcgtcacgagctggatcggtgtgatctggaacgactgtccgaacgagatcgtcgcaagttccaccgggccgacgttttcctgcttatgcatgatcgtcgccgcctctcccggcagatcgattcccgtcttctgtgtcagaccgaactgtttgaaatatttgtaatagttttccacgcccagccgctcgcccagttcaatgaagacgggattgcagctgttcataatgcctgtctcgaacgtctccgccccgtgtccgcttgtcttcgcgcaccggattctgcgatcctccaccagcttatagccgggacagtagaactgatctgtcagcgacaccacgccctcctcgagcgctgccgccgccgtgataatcttaaatgtggaacccggctcataggtgtcgctgatacacgggtttctccacatgcggttcagcagttcctgctttttgtccgcagactccgtcccatccgctcccatctcctcaattaaggtaaacggttcgttcagattgaattccggataatttaccatcgccatgatctccccgttctgcgggttcatgacaatcacggacacctcatccgcctgcttttttatgtatgccttttccgccgcctgctcacagtattgctggatattgctgtccatggaaatatataaatcatagccgttcaccggctcaagccgcgtctctcccgcattttcaatctcaatcccgcgcgcatccgtgagggtgagaatcttgccgctcgttccctgcaaataggaatcgtatttgacttcaagccccagaattccctgattatccgcacccgtaaagccgagcaccgtggacgccatggtatccaaagggtaataccgcttgtaatcctcgtcgaccttgattccggaaaggccgtaggcacggatgcggtctccggtctccttgtcaacattcgtcttgacccgctcaatggagctgaccttctccacccgctttctcacttcctcctccgtgagccccagttctttttgcagtgccgcaatcaccttctccggctcatcgatctgactgtgaatcacggaaatggtacagaccgatttgttcgtcgcaaggatttttcccgtggcatcgatgattcttccccgcgctgccttgatatcacgctctctctcatgaagatcctccgccttctgcccgtagtattccgagcagaagaccatcagatagacgagccgtccgcccagaaacatcagcacgaaaaacacggcgaggaacatcagccatatttttctgcggttgaatgtcttgctccggtaaaatgcatgttcctgtgacatatagaaaaaacctcacgaaagttctccatgaaattttattcatcctttcgtgaggttatgtctgttattgctgtccgttatcctgtgggatgtctccactatcctgtgggatatctccgttatcctgcggggtgtctccgctatcctgcggttcatccccgttatcctgcggcgtgtctccgctatcctgcggcgtgtctgtgccttccgcctcctcttcatttcccggcagggtatccgttgtgtccggcacatccagtccttcttccaccggagtctcctcgtttacaacgtccgtcatcgctgtcgctccggtatctgttcccgtaatgtcccaccctgcatgaattccggtggtctgctcatcgcggtagatgttcatgtaaggaagcacttcctctaagatctcacgcacaatattctgtgcaaaagagctgtggtactgctccaccgcattcggctcgtcgaccacgcagtaaatcacaagctgcggatcgtcgaccggtgcaaatccaataaacgataccagatagttgacgccgtcacgtcccgctttctgtgccgttcccgtcttgccgcccattgagtagccgtccactttcgctgtcgctccggtacctgcggtaacagtggaatacatatactgccgcagcgtctcggacgtactctccgagatggtttcccgaagaagtgtcggctggatctcctgcacaacgttgccgttctcatccgtaatccgttttaccacatgcggctgatagaactttccgccgtttacaatcgagcagaagcctgtggcaagctggatcatcgtcgtgttgaagttctgaccgaatgcgtttgtcgcaagatccaccaccgtcatgttgtcgccggtatagatcagagaatcggttctcgtctctcccggcagatcaatgttggtcttctgaccaaatccgaaaatctgctggtagttttcaaagttatctcttcctattttataggacatctgcatcagcgcatcgttgcaggaattcatcagcgtctgctccaatgtctccattccgtgtccgtctctcttgacacagtgaatgtcatgaccggagatcgtctcatacccgtcgcagtaataggtgtctgccgtggtcaccgtcccggtctcaagtcctgccgacacggtaaaaggcttcgccgtcgatcccggttcataggtatacgacacgcagaagttctgccacagctggtttagtgcatccatctttgcgtcatcatccatggcagcgagttcttcctcggtgtaatacgcggagagatctctcgggttgctcagatcaaaattcggataattcgccatggcgagcacatccccgttattcggatccataatcaggactccgatatgggaagcccccgcatccccttcgcggtaggcgcctgtgtacgcctcgttgaattcccggatcttgtcctccaccacggactggatattcgcatcaatcgttgtcacgatgttgttgccgtttgtcgcctgcttgatcgttttctcaaaattattatccgtattcagatagccgaactcacgcccgttgatgccgtttaacgtgctgttgtaataattctccagaccgttcactccgacatttccggatgccgtaaatccgatcaccgcgctggcgagcgatccgtacggatactctctctgatattccttctcaaaccatacgcccttgatgtcggggttcacctttctgcccttttcatccgtcgcatcctgcagttccacgaacggctgcatctcgtcgtacgatattttcttcttcagcacaatataacggttctgcggatcattccggacatatccgtaaagctcatcgctgctcaagtccggaaaacactgcacaagcgcctgaatcgtcggcgcaacgtaatcctcatcgctcgttaaaacagaacaatccagtatcacattgtacactgcaatactggttgccatcactgtcccctttgcatcgacaatatcgcctctctggtaaggaatcactttgctgtcgtattcctgctgggacaacacaattttctcatatttttcaccgctggtatattcaatatacatcaggcgcccgatcagaccgatcagcatgcctgccacaatggtaaacatgacaatcagctttttttgcatgcgcctgggaaatttcaacagcggtcttctttttttctttgccatgcgcctctcctgtcatcctactcacgcggaatctcactgtactggttcatgtaatcgtcatcgttcactgtatagtacacaatctgcgattccttcgcataggacattccatattctgtcatcgccgtattccggatgctgtcaagatccacgctcgtattgatccgcttgtatgcctcgtcgttgtcggctttcagatctgcgatctggctctcaaggcttgatatctgattcatgcgcgccgtcatctccgactggatgtggatgtatgcaccggtaaagatgccgaacaccatcacagccatcgtgagaaatgccacatagctcttgctcatgcgcagagcacgctcctgatttcttctggctgcacgctttctgtttcttaattcaatctcgcgttcccgctcccgtctctcgcgctcccttctctctcttgtgacatgctccgggcggctctctctgatcctgcgatccggtctcgtcactgcaggcgctgcttccatcctgcggacagtattcccgtcaatataatattttctctctgccgcttcatttctcataactgccacttccctcactacactctaagctctttcaaatacgcggagctttgcactcttcgatctcgagttctctgcaagctctctctcccccggcaatactggcttccttgtaatcactcttcccttggactttttcccacatacacataccgggaaatcactcgggcaggtacatggattctcgttgcgcttaaaattcgtcttgacgatccggtcctctaatgagtgaaaggtaataatacagatccttcctcccggattaagcagatcgatcatcgtatccagattgtcctgcaacacttccagttcgtgattcaattcaattctgattgcctgaaacgtacgctttgccggatttcctccggtcttctgcactttcatcgggatggactcccgaataatttccgacagttctcccgccgtcgtaatcggcttcttctgtctctcgttcactatatgttttgcaatattttttgcaaatttatcttcaccgtaatcgcggatgatccgatagagatccatctcgctgtagtcattgacaatatcccttgccgtgagactctgtctgtcatccatgcgcatatcaagcggcgcatcggcgtcccggtaggtaaatccccgctccggtgtgtcaagctggaacgatgacacgcccagatccagcacgatgccgtccacatgctctataccgatcgcatgaagttcctctttcatgttggcgtaattgctccggatgatcgtaaccttatcgccgaacggcttcaagcgctctcccgctgcccggatcgcatccgcatcctgatcgatgccgatgagacgtcccttttccgataaccgttttgccacttcgctggcatgtccggcaccgccaagcgttccgtccacatagattccgtccggtctgatgttcagatgttcaattgtctcttccagtagaacggaataatgtttaaactccaacctgcgcctcctgcttagatactgaatccaagatccgccatgtgctctgcgatctcgtccatctcatcctcatcgtaggtattctcctgccatctgtccttatcccagatctccacgcggcttaagactcccacgagcaccacatctttttgtaaattggcatattcgcgcaaaaccggcggaagcagaattctgccctgcttgtccagctccactgcggctgccccagcaaagaaaaaacgggaaaactttctggcatccttcgatgtcatggaaatattgcggaacttatcctcaatattgtgccactcttcggcagggtacacaaataagcatccatccagtcccttggtaaccacaaattcactgcctaactgctctctgaatttggatggaacgatcagtctgccctttgggtccactgtgtgattgtattctcccatgaacataacacaaacacctgccttcagtggttttccacaaagttatgaacttatccaccactttgtaccattctccaccactttcctccacttgtatgataatattaccccaccttgtaccaaattgcaatagaaaaaagcccaaaacttgcgtttgggcataaaaaaaggacctcgcatacatgcctcgcatatatgttccgtcctgtttactgtgtttattcaattgtcagaccctgacaccctcctgactctcaagatattcttctatcagcttgtccagtctggtgcttttctcgtaatagtactcaaacctgttctcctgcaacagtgcttcatccaactcgtgtctcgccgtctcgatcttcttttgtaactcatagattctgttcatatgaatcctccttaaaacgctaagattcctatgtctgacgttaacatagcactaaaggtgggcattcccacataaatctgctcttcactgcctgccttacattcattatattactatgtccgaacacgaaaatcaacgaaaacaacccgtcatttttcgacattatgagtgccggattctccactcggcgcgtttattcgccaataacttcatcattgcatccagcgctttgtgattcacctcgacaatatgttctatatcatcctccacgccatgcttgtgcgccagatactcgtcatgcgacttctggataaaagcacagatcgtctccgcgtcgatgagcggctctgcctttttcttattctgcagcttctcatgttcttccttaagctgcagcagccggtgatgtctggtagcctcaccgctctttaggtacgatcttaagtcccgctttaacttctcctcgtaagaacaatgatccttcaggctgcccgggtaaatggtgttgtgcggaaatgtaaaataatccgccagataatggctgatctgtcccagatcccggtaatacttgcacccctttttcttccggatcagcgcatctccctccgacagacgcctgatatgtctgctgacataaggaaacgttccgtccatctcgtgtctcttatagagaaacgaaggcttgatgtccggcagaatacttcccagataaaaagaaaatttgtgacgttttaattcttcatcctttaaattctccaccatatagcgcgccagcgaaatatgtgacttttttctcattcatcggttcccccttttgcactgcatgacttttttcctaattttgctttcattgtacttccatcaggcgcactttacaagaggaaaattccaccggggaaattccaccggaatgcaaaacggggaaccgttttgcattgcctccggctccccgtcttttctcctatttgcagcagaaacttgcgcactctgtctcgccgcaggaacaggcgttgccccctgcgatgccgatatggtccgcgctacatttcttattctcgttaaacgtgcagttgcaggcctcacatgccacatcgattgtctttgactcatgctcttttacattacatccgcagtttttctccccgcgctccacaaagcttccgcagcaggtctcattctgatgcaccgcctcgcttccctcaaccttgatgttgcccttgcagcagcagcgatcctcgttgtaagcacatccggttaccgcacaatccagtaatgtcatatctcttttctcctttcgatccttgttctctggaatgatacattcccattcttaagtatctccggagcaatttcttttataaccggttttctttttccacagcaggaagaatttgcctgttacacaaaaaaggaagtaccacataccggtacttcccttgcactctgcttcctgtgcttactttccacagcaaaatttgtatttcttgccggaaccgcacggacacggatcgttgcgtccgactttctttccgacgataaccgttccggacttcttctgctccagatacagtctcttcttcgtctccgggtcaaaaatgtcattccacatcggaagctcatagagccagtctgccttcgcgtcgaccatgttcttgtacagcttctccttgtcgaatacgaggctgaccttcgtatcttcctccatggtgtcgatcgggttcggctctaccaggctctcgttgataccgtccaagaaacctgtcatatccatgatgctcagtccgtatttatctgcaagctctttgaccgttccctctaccttctcatccgggttcgtcagaagcttctcatagacacccttttccagaagaaaatatctctgccagaatctctgcagttctcctctgtctgccttctcattataagcaactttctgccactgctctaataatgccatatctgattcctcgatttcatgattatttgcatctgtctgccggattgcttgtccgacatctgctatgtcaaagatgcactatagtattataacaaattttccggcatatttcaaagacttttttacagaacccgccaaaagcaacgggacgtcgacggaagcagatcgttcattttgacgtggcaggcaatagggtgagaagatcatgcccttcgatttcagagggaatgtatctggaaattcggatcaaaaaatgttccatctgcatttccatctgaaatcgatgggatgtgtcgcttaccctattgcctgccactaaaaaactattcgttcaacagattgtagtcctcgatggacgcgttgatcgtgtccgccatcttctgtacggcttcctccggtgtctccttgtcatttaacgtgttctcgatctcggtctgtaccgtctggcgtgcttccggaaatacagagagaagcgctcccgcgtactcgcccttggtgtcgttcaactggtcgatcgcggtctggaactgtgggtactgctcgatgttctgcttgaatacatcctcattgtacgcatcgttggtaaccgggaaatatcctgtctgggttgcccagtatgcctgagactctgccgataccagatattccacgaacttccaggttgcctgtgcctttacgtcatcctgattctggattgcccagagggatgctccgccgatggacacaccgccctgatctgtatccttgatgcccggaaaatatgcggttcccacctcaaaggagccgttgacatcgtttaagatctgctttaaggaagcggtggagccaagcgtaatcgccgcttttcctgcggagaagtctgtcagacctgcatcgccgccaactcccacattcggtgcatatcccttgtcgtagagatccttccaggcggatacgatcgagagagccgcaccgttgccgtcaaaatccacggctgtcgccgccgcgcttcttccgttgtcattgtttgcgtaggccagtccctgcttgcagataaactgctcaaagaaccatccgtagattcccatggaaagtgcctctcctgcaccgcccttgttcacaagatcgtcggcaatcgcatcgatcccctccaggctcgtcggcacctcggtgattcccgccgcatcaaacatatccttattgtaatagagaatcggcgtggatgtattaaacggcatggagtagagctggtcgtcgatcgtgtagtaagcggcaatattcggcacgatattggagttgtcatagccgttcgcatccatcagctcctgcatcggaatcacccagccggagtcgatcatgaaacgggtgccgatctcatagacctgaatcagatccggaccgcttcctcccaccatgctgctctttaatttgttgatcgcatcatcgtactcgccctcaaactccgcatccaccgtaatgccataggtgttctcctcattgaaccgatccacaagcgcggtaagtgcctcgccatttacaccgctcatagaatgccagaatgtgatcgtcgtcccggaaagatccgcatctgccgtggcggacacattcgtctctttttccgtcaccgttgccggatcaccctgcgcactctccgcttcccctgcagcgtctgcggacgtatccgccgtctgcgccgtgcttcccccgcagcctgcaagtgctgctgcaagcatggatgctgttaacaatgatgcaatgattctcttcttcattcctcttttttctccttttgaattagtgagttccttttttctatgtcagcccttgacggcaccggaaaacataccgcggatcagttgcttttgtcctagaataaacacaaacagcgacggcagaatcaccatcacaactcccgcgattaccatcgtaatcgactgggaatccacactgtttaacatgctgataccaatctgcacggttcgcatctcctcggttccggttactaacaacggccacatatacatgttgtaagcgttgatgaaggtatagaccgccatcgctccgatcgccgacttcgtcagagggatcagaatccggacaatgaacaccagattcggacagccgtcgatctttgccgcctcatacagggattttggaaaggtcagatagaactgacggaacaaaaagatccccatggcggaagtgatatatggaatgatgagcactttgtaggaattcagccagccccatccgcttaccgttaaataattggaaataatcgtcgcttctcccggcaccatcatcgtcgccatgatcagcataaaaatcacattttttcccttaaagtccagaaatgacagtgcaaacgccgcaagggagcaggaaataatctgtccgagcgtaatgcatcccgccaccagaaacgaatttaaaataaaacgaaacagcggaatctttgtaaacgcctgtgcaaaattgtcaagcgtcggctgcttcggaatcagattcatctccatcgagaacaattccccagatggcataaacgcaatggaaagcgcatacaaaagcggaaggatcaccaataccgacaccaccagattgacgccgaaacggctccataatctgcgccgttttctgccgagttccctttttttcatggtctcgtgcagccgttcgatctcttctctcttcggatgtgccgcagtgcgcggctcgagcctgatatccatcaatacttcactcccttcttttccagacggaacatgagcaatgtcagcagcatgacaatcaaaaacagtaccacagactgtgccgccgccccgccgaagcggaaattaaaaaacgcgtcgcggtagatcgaatagacgatcaggttcgtcgattcacccggcccgccttccgtcaagattttcacctgcccgaacgactggaacgccaggataatattgacgatgaccgtataaaacaggatcgggcttagtcccggcagcgttaatctggtaaacttctgccactcgttcgcgccatccacagacgcccgctcatagatcgactcgtcaatattggcaagtcccgccgaaaaatacagataattgatcccgctgttcaaccacgccgtcagaagtgccacgcacaccagcgcatagcgctcgtcatgcagccagttgatgtccgaccgcaggaatttgtcgagaatgccgatcgtcggatctaacataatctcgaaaatcagtgcagcggcgcttgaggcgatcgccatcggcagtgcgtacgccgtggaaaagacccggattcccggaaaatttttattcaccagcagcgccgtcacaagaccgagcagcatgctgaccattaccacgatcaccacaaaaatcagggttacaagcaggctgttataaaaagattctgacgtaaacagatcgatatagtttccgaagccgacaaacagctttgcctgtcccagcttgtcggttttatacaagcttaaatagatcgtttttgcaaacggataaaataagaacagtccgaatacgataagacacggcaccaaaaacaggtacgggctgatcttttgtcttagctttacaaatgcattcatgttgtctcctttcagatgcgcatttcactgtcgcagtcaaacagatggatcgctgtcacatcgaagtacagccggcgcacctcacctgcccgggcgtcatattccgccggaatctttgccacatactttttcccgtataaaaggaaaaacaaaagcttctcggctccaagcagctccacctcaagaatcatcgcctccacgtaatccgccccggcgcttacagattccggtgcctcccacaggatgttttccgggcgtatgccaaggatcacgctgtcgcttccgtgcctgcttatccacgctgcatcctccctgcacggcatcatgcggtactcaccgaccagaagtgccggagcctcctcccaggaaaccacctgtgcctcgaaaaagttcatggacggcgttccgatgaatcctgcgacaaaccggttgaccggctttgcatagaggttcgccggtgtatccacctgctgcatttttccatcccgcatcaccacaatccgtgtgccaagcgtcatggcccccgtctgatcgtgcgtgacatagatcgtcgttgtttccaccgcatgctgcaatgccgccagttccacccgcatctttgccgtatcgtatactttcttttttatctccttcttatcgaccttcctcacgctcagggaaaatgcgatattgtcgtacacgctcatattgggatacagcgcataattctgaaataccatggcgagattccgctcccgcggctccttgtaattctcgatctctccgtccacccacagctcgcccgacgcgatgtcctccagacctgcgatcatgcgcagcagcgtcgatttcccgcagccggacggtccaaccagaatcaaaaattctccttcttttatctcaagcgaaaagtcatgaattgcttcataaccgttccggtatacttttcccacatgttctaacgccaattcagccaaaataaaacctcccagtgctctcttacattgcaaactcaacagtccttattgtaagagttccaccgggaggcagctatcaaattcctgtaatattttttgtgttttcagtaaactttatatggtttttataaagtttgtacaattcgtgtaaattttttctgcttgacggaaccggcttttccatctaccataaaggtacagccgtaaaccagaaggctgtttagaaatgaggttaccatgaaaaaaatgaaacgtattcttgccgcagccggcgccattcttctgcttttgctgtatgcatccacgctcgtctgcgctttaagttccagcgagaattttatgaatctgctgatggtctccatctacgcgaccgtcatcattccagttctgctgtgggcgtacacgctcatctataagctcgtgcacaagtcgtccgaagaggatgccgatcaaaaggagccgccgcaggggcagggaaaatagatacagatttcaggataagagaaaaacagacagaatgttccagaatacaaacggatgcggggattctttgaaacaaaatgagagaatttcttccctgcccgccggaacatcaaattccgtgtctttgccacgcttggacaatccacagggtgtgtccggcaacccgcagacaatgagcggactttctagtgtccctaatgggcaccgcttcacagacaatataaaaccgcgcgaaccgaactcgccggcatctgctattgaaaacagggcagatgccgactcaggcagcggcttcgcgcggttatgttatgttcagcggtgtccaaagggacacacgaaaatcctaaaattgtctgccggcttgcggacacaccctgtagagtgctccaagcttggaaagacatggatcatcagggatgtttcggcgggcagggttagaaattccgcattttgtgtttagaatgtccgcatcctttgtatctggaacatctatcgtttttctcttattacggagtccatctccctgcccgtgcagtggctcttttgatccgtcctctactcttccgtactgtcctcggacgcggcgctctcggtcacgtctacgcccacagccgtctctacgccctcggtcgcgtctacgccctcagtcgcgtccacactctcagtctcctccgtctcttcctcatttaacaattcctgcggtgtcttggagaaagtgccggagagatcccgcgacacgagatagatcttatcgctctctgccaccttcaggtaatactgcccggtcactgcatttttatctccgagctgcagcgtcatcgtgccgtctgccgtggtgaaggtaatgatccccgacggattttccagaccgtactgcaccagatcctcgccgtctgtaatctcactctccgccgtaaggcccgtgaccgcatccagcatggcgtcgatctgtgacgtgtcgagggtgagtgaaatatccccgtcccaagtccactctccgtccgttttcgtgtaggcataaacctgaccgcccagcacgtacgagaatgccgtcacatcatcggttttaaaatcgacgactgtaagcttctctgcttcctcctcgctcgcctcttttttctcctgtttctgattgtatacatgaattcctccataggctgctgcaagcactgcgaggacaagcagcatgccaaggaactgttttttctgtttcttcattatttctttctccttaccgcccagatcacaacaccggtcacaatcagcagaatcggcaggatgaccgttgccgcaagtccgccgatcagcgttccgagtgacgtaaccgtaatcgttccaagcgtatactccttgactggaatgacacccgtcgactctccatcgtcaccggcaagctgtcctaacacatctgagaacatggacacatttcttcccgatacaatcgagtccgcattgtcggtcagcatttccgttgagccaaacaccaccagtttcatcgtgttgtcgtcatccacatcctgttctgccgccagcgcaatcgtaaacggtcctgcaaagtccccgtcttccagctcagacgtctccgcatttgccacatccgtcttggacaccgcctgatcgcttgtgacaagcagcggtgtgtaggtaatatcttccgcttcctccggatagctcagtccctcgctgtacggcgcgaaaatgtactcgcccgtcacagatgaagtataggctgtcgactcgatttccggcagcagataatacggtgtgctccggtagcatgccgatgcactgttttccatcacaatgccagctacccgttcaatgccgtacgcctccagaaccgaagcaaaattcggcagatcctgatactcgaagttgcaggcgatgagtgctcttccgccgccctgtaaatagtctttcacctttgcggcatcatcctccgataagtctgatgtcggtccgttgatgataattgccgccgcatcatccggaaccgcatcttccgtcagcaatgtcagctgcgacaccgtcatattggctttctcaaccgcctccgagaaaccgccggaaagagcattttctccatgaccggtaatctcgtagatgaccggaagttcactgtctgccttcgtcacatactgcagggcactggtcagctgcccctccgcatcataaccgtccacggagcttgaatatgtagaatagtcataagaatactcatagacatcgctgtaatccaccacgcgcgatctcgcgtccgacaccacgatcatactgttctggctcggcgcactgtccgtatactgctgataaaaattcgggctcttcgccggatctttgtaaaccaccttcaaatgtttggagagatcttcataccgttgcagtgtctccgccaacgtactgtccgccgacttctcggacgaaagcacatagatcgtgacgtcctgcgacagatttttcacataatcctttgtggtatccgtcagactgtacagctttgtggaagttgcatctaccgccgtccaggaggatggcatctcctttaccaccaggttgactgcaaccgcaaccgcaaatcccaccacaatcatcgccacggaaaacattcctgtggtcagttttttcgtcgtcatgctccagcgtctcttctgcacacactggcaggtcaaaaacaggcacaatcccgtcacactgacaaaataaacaacgcccgtcagatccagacagccgctcataaaactctgaagcggtgtgtacagatcatatgcgcccagtaccttcgtgaccagatggtcgccgatcaatcccgtgatgctgttcatcatatatcccagaaaaaggaaggcaaacgccacaaccgctgcaatcacctggctctccgtaagcgccgatgccagcataccgactgcaatgcaggtgcatccgtacagccagaaacctaaaaccgccacatagttttctcccagcggcaccgtgccaaaggcagccagaacaagcggcgttaccgcaatcaccgccacggcaacggtaaaaacgcccaccatggccagaaattttccaaaaatcatctttccaagcgaaaccggcgctgtgagtaccagctggtcggttctgctgtgccgctcttccgccatggaacgcatggtgagaatcggaacggcaatcaacatgataaacgagatcgccgaaagtgtgtacgacacatacggatatcccgcccgcagattatacgctaaaaagtacagaccgtacagtgccagaacggcagcgataaacagccatcctgtgatattctgaaaataacttttccactctctttttaaaattgcaatcatgcctgttctcctttcccgtctgctcccgtaagttcaaggaaaacatcctccagcgattttgtctccgtgtgcatttccagaaccggaatctcttcttttgcacaggcatgaaacaatgcctcacggatatcttcgccccgctccgccgtcacatgaaacaggacttcctccgctgcttctcccggctctctgctcacttccgccacacccggaagttcctttaagagttcctccatgcgctgctctttgtcttttaccagaagcgcgatttcctgtgctcccgacatccgctccagcagatgttccgtcgaatcgctcgccacaagttttcccttcgacaggataaacacatgatcgcagaccgccgaaatctctgtcagaatatgggaactcaaaatcacggtgtgcttttttccgagctccttcatcagttcacgcacttcgatgatctgcttcgggtccagtcccaccgtgggctcatccagtataatgacatccggataccccatgatcgcctgtgcaaagccgacgcgctgccgatatcctttggagagattgcggatcagcctctcactcacttccttcgtgtgtgtcagctccataatctcttctgtctgtgtttttcttacctttttatccagacctttcagctctgccacgaaatccagatactcccgcaccgtcatctccgtatagagcggcggtatctccggcagataccccacgcatttttttgcctcctgcggatcggcaaaaatatcgtgaccgttgatcttcacctcgccgctcgtcgcgccaaggtatcctgtaatcatattcattgtcgtggattttccggcaccattcggtccgagaaaaccatagattttcccaggttccaccgtaagcgtcagatcatccaccgccacatgttccccatattttttgaccagatgattgatttcaatcaaaaccatttcctcctttttcctgtttccgtatctagcctacgaaagaaatgtgttcaaaagggaatcattctgtgataattctgtgaaaacaaacccaaaggaattgtcgcaataagcatagacctctttggggtgataagtaatattacaggaataccagagaacaaaaaagttccagaataaacagacgacggcaaattctttgaagcaaaattcacgtatttcttccatgccgcggctgtcatctcattccgtgtctttgccacgtttggacactcacggagtgtgtccgacaagccgcagacaatgagcggactttctggtgtccctaatggcacctcttcacagacaatataaaaccgcgcgaaccgaaactcgtcggcatctgctattgaaaataaggcagatgccaactcagacatcggtttcgcgcggttatgttttgttcagaggtgtccataagggacacacacaaaagtcctaaaattgtctgctggcttgcggacacagtccgtggagtgctccaaacttggaaagacacggatcatcacggatgtcagctgcggcatggttagaaataccggattttgcggtcagaatttgtcgccgcatgtttatctggaacttttaagtatctagttcttataatattacttatcaccgcaaagcacgatatgcttcttgcgacagtttcttttctagcactctacaccgtattcttttaatttctgtctggcgtcctcataaccggtaaaacgaatggcagagatgccgcaggcgatggcaccgtccacattgttctgtctgtcgtcgaggaacacgcactcctccgcgcgcagatgaaagcgctcaagcagggagtgataaatctccggctccggcttaatctgcttcacctcgaaggaaaacaatgctccatccacgtccttaaggaagccaagcgactgatccttcgtcttcgcgtatgtccaggcaccgtaattggaaaggatatacaggcgataccccttgtcttttaacgtccgcatccattccccgacatacggaaacggataaatcgcccggttcacatgctcccagaaattgcggatctgtgcttcgtatgccggagcttttctgataaagcctgtgagaagttcctcatcggacagggctccccggtccgcctcgtcccagtcactggtgtgcaccgtggcatccgcgactgcgcgcaccgtctcttcatccattccaagcgcgcgcatcgcctccaccggttcccatgccaccagaacctgtcccacatcaaaaatgacattcttaatcatatgcgtcatcctacttgctgcggtagataatatcctctctgcccggtccgtttgataccatcgtgattggatatccgatctgctcctccacaaactctacatactttctgcagttctccggcagatcttcgtatttcttgatgccgcggatatcgcacttccagcccggaagcttcttaagtaccggctttgccttctcaagctttgctgtcaccgggaaatctgttgtcacttcaccgtcgatctcatagcctacgcataccggaatctcatccaagtatcccaatacatcgagcacggtaaatgcaacgtcggttgttccctgcatacggcagccgtacttgcttgccacgcagtcgaaccagcccatacgtctcggacggcctgtcgttgcgccgaattctccgccgtcgccgccgcgtcttctgagctcatctgcctcatccccgaaaatctcgctgacaaatgcgcctgctccgactgcggaagaataagccttgcacaccgttacgatcttcttgatctcatacggcgggatgcctgctccgatcgcaccgtaagctgccagcgtggaggaggatgttaccatcggatagattccgtgatccggatcctttaaagttccaagctgtccctccagcagaatacgcttgccgtctttgattgcctgatcgaggaataaggagacatccccgacatacggagcaaccatatccctgtactcatgcaaggttgcaagaagttcctcttcctttaataacggcttatgatacatatgctccagcatgatgttcttcgtctcgcaggtgcgctttaccttttcttttaagagctcctcatcgaacagctcgctgacctggaaaccgatctttgcatacttgtccgaatagaacggtgcgattcctgactttgtggaaccgaaagaattcttgccgagacgctcctcctcgtactggtcgaacaggacatgatacggcataaccatctgtgctctgtccgagatcatcagcttcggtgccggtacgttgcggtctgtgatcgacttgagctcgccgattaccttcgggatgtcgagtgcgacaccgtttccgataatatttgtgatatggctgtggaatacgccggacggcaatgtgtgcagtgcaaacttgccataattgttcacaatggtgtgtcctgcatttgctccgccctgaaaacggatgacgatgtcagcctcatccgcgagcatatctgtgatcttgccttttccctcatcgccccagttagcgcctactactgctgtaaccatatgtttttcctcctgatatgatacacttttttgccggaagtccgcattttcctgattccaggctgcatccatgcggccggtctgtccgaaagcagcatccactctgtaaatctgcctcatgacataaaaagtgacggttgtaaaaaaccgtcactcacttccgcctttttacttattgattatacacgaaccttttgcataagtaaaatcaatattcattatatgtggcataagtatttattatgcctgtttctaaaagaaaatccctgcttactgtgatgtcccctgtaccagaacattcatcagcgtagccgctgcggctgacagcggaatccgttcatttgcgacaatgcagaacgtacgcgccggtatctcctccaagaaccgcagttcaaacagatctccctccgtcaggtgctcctcggcaaaatttctgaccacacttgcaattccaaggttgcgcaccgcaaactggatcagcatatcgctggtggcaagctcaaactccggccggatcgtcacctgcttcgacgcaaggaattgctctacatacgtcctggtcgaggtatttccctccagacacatgaccggcagcttcatcagttcctcgtaccccagcatgcgttcctttaaatattcaaacttcctgcctgccacaaacacatcccggatctccttcaccggaatacatttgagcgaagctctcttctcgaccggtgtgctcacgatgccaaaatcaatgcggccgtcgcagagatggcggatcgtctccggagtcggcgcattcgtcaccgtcacgcggattcccgggtagcgctcatgaaattcttccagatacggaagcaggaaatactttaacgtcatgtcgctggctccgatacagatttcgccctgttccagattcagcatctcagagagcttcctctcgcctgagaggatcgtctcatagccgcgctgcacataggaatagagcatctccccctccttggtcagccgcacgcccttggtcgtccgtacgaacagtgggcacgaaagcgcctgctctaaatgcttcacagcctggctgactgcaggctgcgagatggtaagctgctccgccgctaatgtgatgctctgggagcctgccacataataaaaaattttataatattccagattgatgtccatggatctctcctgggaaaaaagtctcatttttttacaaaaacggattgtattttccactgtcatgaagtatactatgccttacgcaaagtaccagtatctctactataacagactatgaagggagacgcaatccaatgaccaaagatatgaccaccggcagcccgcttcggattatcctgctattttctattccggttctgctcggcaatctgttccagcagttctataatatggtagatacgattattgtcggacgctatctcggcgaggaggctctcgccgccgtcggctcaaccggctgcctgatgtttcttgtgctcggttttgccaacggcatcgcccagggcttcggcgtcatggtttcacacgctttcggagccaaagattttaagctgctccgtcactacgtggcgctatccctgattcttacactgattatatcgcttctgctgaccatcccaacggtgacagcttcccgcctccttctggcatggatgcacacaccggaaaatattattgccatggcagacgcttatattaaggtaatttttgcgggcattctgctgacaatggcgtacaacgtgttatccggcatcctgcgcggcatcggcgacagccgcactcctctctacttcctgattctctcgtccgtgctcaacatcatcttagatgtcgtactgatcgtgtacacagggcttggaaccgcaggagccgcctacgcgacaatcatcgcacagggagtctccgccgtgctctgcttcttttatatgtaccggaaatacgatatcctgcgcaccagacatgaggattattatctggattccgccggcgtaaaaaacatgctcgccatcggtgtgccgatggcgctcaactactcaattaccgccattggcaccatgattatgcagagtgcggtcaacgtgtttggctcgagtgtggtcgccgccttcaccgcggcctccaaggtcagcaatatcgcgacccagtccatgccgacactcggcaccgcaatggcaacctactgcgggcagaacctcggtgccggcaaatacgaccgcatctacgccggcatgcggcagggacttttcctctgcttcggtgcggcagccacagccgccgcgatctgcatctttggcggacgttttattgtgagctggttcgtgagcaatccttccgaggagatcttctcttccgccatgcagtacctgacgatcgcaagctggttctttctcccgctcgccatgatctttttataccgcaatgccttacagggactggatcagggactgatccccatgctctccggcgtcatcgagctcgcctgccgcttcggcgtcatcgctctcgttccggcgagcaccggcttcttcggtgtctgcttcgctgatccggctgcctgggccggtgccggcatcccgctgtttatcacctatcttctctgggagcaccggatgaagcagcaccacaaagcagcgtaaccatttttgctccacagaaaactgcatcctattgcatcaaaaagaccgtactccggaattccggaatacggtcttttatattgtcctgttttattttatctatgcttccagctctggaatcttcttcgagcaggcaacggcaagtgccccaggtccgatatgacatgatacgctcagtgacagcggatccatatgaatctccagtcccggaaatgcttcctgcacctcctgcctgaacgcttccgcagcatccagatcgtatgtgtacgccatctccagatgcatactctttccttccggatcatggaaccgctccgcaaaatcgtgcttcatcgcctcgatcatcaggttcttcgcctgcttgacggttctcgccttggcaaatgcatccagcttctctccctggatctgcagtaccggttttagctttaacaacgttccaagcgctgccgccgccggcgtaatgcgtccgcctttcttcagataatacagggtatccaccataatataaatggaagactcaaatttatctctctccagaatctccttaatctccactgcactgcgtccctgctctgccaacgccgtcgcatccagcacagactgccgctgcgtcacagagattctctggttattcacaacctgcacctttccctcgtaatcctgcgccagcatcaacgccgtctcacaggagccgctgaggccggatgacatcggaatatgcacaatctcatcatactccttcagcaatgcatcccatgtatctgtcacattcccgacaagcggcatcgatgtggaaatattggcattctcggacagcatctgataaaactctttctgcgacagatcaatgtcctcatataatgtcttgtctcccacaaaaaaaggcatcggcagaatggtgattccaagttcttccgcctgcaattgcgtaattccgctgttgctgtcagatacgattgctactttgctcataacttctactctcccttacaatgtctctgatcgttccctgatgttcttcttaaaattgatgatctcatgctcatactcagtattcatataagtggaatgaatcataaaatctgccgacgcccggttgttggcgatcgggatgtcatacacctgcgcgatacgcaaaagcgctttcacatccgggtcatgcggctgtgctgtcagcgggtcagagaagaaaatcacaaaatccactcttccctccacaatctttgcgccaatctgctggtctccgccgagagggccactgttatagcctcttaccgggagtcctgtctgatccgtaatcatacgtgctgtcgtacctgtgccacatagaaaatgctgctttaaaatctccttgttctgctcacaccagtcaatcagatctgcttttttattgtcatgcgcaatcagtgcaatattcttttgttttcctattgtcattgtaataaaatcttcactcataatctctggatccccccttatcatttttctaatgcattgtaccatattttgtcccgaaccgccaccaaaaaataatagaaagcgcaccgtagcacgctttctattattaaaaacgctaaaatgactcttctattcattctgcatgtatacttttgtataccgtatcacgcctgttcctgtgctacaacctcacgcattctctccgaaatcttgtaaatttcgccaagcagatcattcagattctccatattctgcatactatcctcactcatagacatgctgttttctgaggatgccgcaacctcttcactcgttgcagataaattggtaatactgtcattgatctgcgtatttgctgaaaggatactctccacctcaccagacaaattctgcatagaattctggaacaaattcatcttatcctcgataacagtaaacttctctctcgttgtctcgatcatctcgttctgcttatctgcagactccgctgacttctgcatatttacagaggcttcctccacatttaccgtcaatttttcgataatctccgtgatctttcccgtcgactccttcgtctcctctgaaagcttgcggatctcgtctgccacaaccgcaaagccttttccagcctcccctgctctggctgcctcaatggacgcattgagtgcaagcagattggtctgatcggaaatgcttaaaatcgttccgataatgacctccacttcctttatgcggttgtccagttcttccgtcgtggttcttgtggcgcggttgatctccgccgtctgggttgcctgctccttcagctcggcgatcaggtcagcgccctcacggagcgcgtcctgtgtcgcatctgacgccgtctgcatctctttcgtctctttttcggcgttttcaatattcgtctggatgccgttcgtctgcatcgtctgctgctcaatcgcttccgccgtcagcttgacgctcgatgcaatctccttgacggagttgttgctgctgaccatgctctccgtcagcacatccgctttctctctcgcactgtcgaacttctcggacagcgctcccgacatctgaatgatctcatccgccacacgcgccgccgcatccatctgtgacttaatggcatctgtatcctcaacatggtgtctcgcctgcagatctaccgcaatacacatcacaacaccgaaagaaatggcaaacactatctgtacaactgactcgctccgtgtcccaggatatttcacaaaatgaagtatgcccgaaattacattcagcgctcccatcgcaatagcgctgatgcgtgccagccttatatcacgatacaacataaccgtaagcataattaaatacataaatgcataaaagaccacgtttttgtttgataagatcatcactgcataggtaagaaacatacacgaaagtgaaatcataacaaatttcctatccccgcgataccggacatgtccaacaaaaaatatcacgagaagaatgacattgactaccatgcgtgccagcaccacagatttatccgctgttgcatccacaaatccaagcagtgtcagtgcattcaaaagcccaaggatgataagtccaaggatgaatgtaatcttgttgcgttccaatctttgtttttgttttaatttcataacaatcccttcctttgtaagatctcacccgggcagacggatctttccatccatcagcatcttcacaaacgccgtatcccggataatccaggaatctttctcaatcagaatattcctgtgatagacttcctccggcgtcgcccattttaactgatacccctttgcaatctcactcggggtaagtgaaagtggcgcctgctcgtccaaaacatcgcagtaaaaaaaaagagaatggcagataaactttttatccggctcaaaaatatctctgtgcagttctattatctcgcccagctcacagatactcttcggtctgacaaaaagtcctgtctcctcttttacttcacggatcagtgtctgctcataattctcacccggctcctgcccgcctccggggatcttatattctccctcccggctgcactgcatggcaagcctgccgtcacgcacaatgatcgcccgtatcgaatacttttcatagatacccgtcgtgccctcataatcacgggcatcaaatgtcgcaaggatcttcatacgcatttcctccgtgccgcttcacttttcttgaattatattccctttttgcaattatcgcaatatttttcaaatatttttattttaaacattttctgtaataagaacacagttttctaattgcagaaaaaaaatccaccccggtctattgaccgggatggattccctcttcggatgggatttacatcattcccattccgcctgcgccgcctgccggcattgccggtgcgtcctctttgatgtttgccaccacagactctgtggtaagtaaggtagatgctacagaagttgcgttctgtaatgcggttcttgtcaccttaaccggatccaggataccctgctctaccatgtctacatactgctccgttgctgcgttaaatccaacgcctgccggagattcttttactttattgatgatgactgcgccctctaatcctgcatttgcggaaatgtagtacagcggagcctccaatgcctttaaaataaccttcgcaccggtcttctcatcgccctcaagcgtatctgcgagtgctgccacatccttggttgcatgaatgtatgcggaaccgcctcctgcaatgatgccttcctcgaccgctgctctcgttgcgtttaacgcatcttccatacgaagctttgcttccttcatctccgtctcagttgctgcgccaacacggatcactgctacgccgcctgcaagctttgcaagacgctcctgtaacttctccttgtcgaactcggaagttgtctcctcgatctgaccgcggatctggtggattctcgcctgaatagcgtccttattgcctgcaccgtccacgataaccgtgttctccttctgaactttaacggattttgcacgtccgagctgatccatcgtggtatccttaagttctaatccgagatctgagctgataacctgaccgccggttaagattgcgatatcctcgagcattgcctttcttctgtcgccgtagcccggagccttgactgccactacattgaaagtaccacgcagtttgttgacgatcaatgttgtaagtgcctcaccctcgatgtcctcagcgatgatgagaagtcttgcgccgctctgtacgatctgctctaataacggcaggatctcctgaatgttgctgatcttcttatctgtgattaagatatacggatcatccagaaccgcttccattttatccatatcggtgcacatatatgcggatacatatccacggtcgaactgcataccctctaccagatcaagctctgtctgcatggtcttggactcctcgatggtgataacaccgtcgttggataccttctccatcgcatctgctaccatgttgccgacttcctcgtcacctgcagagatagctgcaacttttgcgatctgatcttttccttttactttggaggacattgcaaggatggactccactgccttgtcagttgccttcttcataccgcggcgaagcacgatcgggttggcgcctgcctccaggttcttcataccttcctggatcattgcctgtgcaagtacggttgcggttgtggtaccgtcaccggcaacatcgttggtcttggttgcaacttccttgacgagctgtgctcccatgttctcgaatgcatcctcaagctcgatctcctttgcgatcgtcacaccatcgttggtgataagtggtgcgccgtaggacttgtcgagtacgacgtttcttcctttcggtccgagtgttactctgacggtatttgccagcttatctacgccggctcctaatgctgttcttgcctctgttccgtatttgatttcctttgccatgactgatctacctctctatctcttattctgattcaaattacagggatgcctcccggctgcttattctacgacagccagaatatcactctgtcttacaatgatgtattcctctccatccagctttgcctttgttccagcatattgggaatagatgaccttctgtcctgtctttacctgcatggtaacttccttgccgtctaccattccgccaggacctacggcgattacctctgcctcctgcggcttctcctgtgcgctgctggtaagaatgataccagactttgtggtctcctctgcctcacactgttttaatacaactctgtcactcaatggtactaatttcattttgtagacctcctgttttatgatctgaaataatatctttcgttttgttattagcactcatttcgtttgagtgctaaccgatagtgttataatagttttttgccctgtgatctgcaaccggatatattcctgtatattttcatttagccagttcttttctcattttttctttcgttttcttgtttttttatattttcatccattttttgtgattttatactttttttagaaacttaccgtcgcttctctccaacgacctgtttcaccgttttgcggacggttttatttccctccgaccacaggagttttaaggctttcgcaaagaccttctggctcttctcaggcagacggcttttcgccttcatcagctcctgcaccgccttccatttgctgtggtaaaaatcatccaccgtcttaatgtccgccgcctcaagcatgccgaataccgtatccacaatctgttcgcgttcctccccgttcagctggtaaatccatgccttcatcgtctcatccaacatcaggctctggaccgccacctccctgacatagacaaaggatgtgccgagcacctcccacgacatggcatcgtgctgctggattccactgttggaactgcgcaccacctcatacgcctcctgatgctctaagagcattccgacaatcgaagattccggcagaatcgtgtggattttcggcagtacacgctggtatgccgcgctttctacaatgtccctgcggaaccccggtccgtcgttactgtacaccgcaaggatccggtcctgcaatccgttgctgcagtggactgcagcatagaccgcaagatttccgcccttagagtgccccccgatgcgcacaggacggccgccctctccaagcatctgttccacgtacgaaacggctttcagctgcccgggcgtctccgagaggtatcccatgttaaaatcctctctccatcccgtgattgtattgtccgtgccgcggaacgacacatagatactgccatccggcagcccggcgcacatgaccgcaaactgggactgctcctcctcactgatgtcattgacgtaaccccagagctttacatcgcggaaccgctctgttttcgccatcttctccagaacaaacggcgccgcctttgtcattgacacccgcgcaaggatctcctccctgctgttctgttcccagaacacggcggatgcctccgcaagcgtgactgcctccgcctcgctctgcccggtcacaatcccgtcaaacgaagtatataccagctccgcaaaaagcagattatccacctcgttaaatccggacgcggtgaaagtcagatccccccgccagtccagataatccatcatgtttgccatcccgctcctccttctcttcccgctgcaatcccgttgcttcctatccgatcagcccatagtgcttcagtccgtttttaattccatgattcataatatcggtcgtcacatactccgcggcagccttcgccgcaggtgccccgtttcccatggcgatgccatgtcccacataggtgagcatctccagatcattcgtgctgtcgccgaacgcataagtattctccctggcaatcccaagcatgtcacatacctgcgctattccggtcgcctttgtgtagcccttcggcaccacttcaatcagctgcggattgtgttcaatcacatcaaaatgcggcaccagttccgcttccaccgcacgcacgctcgccccgttcatataagcgctcaatttgttgatctcatactccgtctgcccacggatctcccgtacatcctctcccagttcactgcgcagatactgaataaacggatcttccttaaaatcttccccgtttgcgtagatataatgcggtccctccagcactgcttccatgtggtatgcctcaatgacacgtagaagttcctccgcttcttcaggcgtaagcagcctctcgcacaccttctttccttcatattcaatatgtgtgccgcacgccgccacaatcccgtcaaaccctattccaaggatcttctcactgcggatgttcgaccggcttctgccgctgcacaaaaacgcgtaattcccgtcagccctaagttcgcgtatcgcttccgttgtactttccggcacctgcatgtgctcattccacaaggttccgtctatatcaaaaaacactgcttttttcatcttttctctccaatcccattctctcgcgtaaaagtcagttctgctatatacaaaacattctctccccgccgcatggtgcacattccatcctaatataagtaaaaaacaccgcgcgggctgaactcattatatcagcccgcgtggtgtctggcaacttgcggtttctatttcatatatcctgttactctctgtgcatggagatggtgttcatctcgtaatgctcaatgttctcgtgaattccacggtcatctgcctgggaaatcagagtgtcacggttcttcttggaagagatctggtcattgaacgcactcggtccgccgacacagccgccctcgcatgccataccctcgatgaaatcctccggcagtctggctgctttcagaagaagcagtgccttcttacactcggcagctccgtttgccacacatacctttgcatcgatctcatcctcagactctttcagactctgaagaacagctgcggttacaccgccggaatttgcaaaacgcttaccaaaggtggatgcgatctgatcatcgtttgcagccggctgcaatacgacgctcttcgctttcatgatcgcacggatctcactgtaggtcagcacatagtctgcattgcccggaatctgctgatccacaacctcagacttctttgcgatacacggtccgataaataccgtgacggcttccggatctcttgccttgatgaggcgggaaaccgcgcacatcggagataccgtcgtcgatacacagtctgccagatccggatagtgcaggcgcaccatatttacgaatgccggacagcaggaggtaactttcttctcgcccgccttgtaagcttccgcccactcctcggactcgtaggctgccgtcatatcaccgccgagacctacgtcgaagaaatcggtaaatccgagttctttcatcgcattcttccagcttgccatcgtgatgtcgtccccgaactgtccttcggtcgccggtgcagccatcgcatagacatgcttgccctcgcgcagtgcgttgattacatctacgataaagctcttagagccgatcgctccgaacggacagctgtggatacatttaccgcagcggatacatttcttcttgtcgatgacggagatcccgtgctcatcgtatgtaatcgcattgaccgggcagctgaacttacacggtctcttcagatgtgcgattgcattgtacggacaggcctgcgcacatcttccacattctttacattttgcaggatcgatgtgggagcgggttcttcccggctcaatcgcgccgaatttgcaggcattgatacatgcctttccaagacagttctggcagttctccgttacaatataactggaaatcggacagtcctcacatgcagaactgatgacctggatcacattgccgtcatcggtcaaaccaggcgctttgccctccgccagacggactctctgtctgataatctctctttctttataaatacagcagcgaaactgcggtgtcggacctgggatcaggctcattgcgatattgtctctcttctcgtcaagctcaccggcaaatgccagctttgccacttcatagagtacgtcgtgtttgattttgatcacattttcatcagcatacatcgtgttttacctcgcccttttctattcgttaattttttaaccatcttagacattatatattatctgtatggaattgcaagagaaacgcatgtatttctttgcgtacatgatgtataccgtcaaattgtaaaaaatccgaacgctgttttgtgcaatattttcccggaaagcccgccgtactgttactttggtacctgttccatcaggaacgcacgcatctgttcttcctcccagatcacgggaaccggatagttcggattgccctctttgagcgcgcgcgccgaaagttccggcacatcctctttgcgcagcatgacaagctgctccgggatgcccatgctccggttcatccggcggattctctcgataaacgcctccgccagcacggcatccgtctcctcacggcttccatcctctgctccggctgcacgcacttcccgctccagctctgctccggctgcacgcacttcccgctccagctctactccggctgcacgcactttccgctccgtcttacccccggatgcgcgcacttcccgctccagccgtgccagcggctcatgcacggcactcccgtatgccgcaagcacctttggcagcagaatcgcattcgcttcgccgtgcgggacatggtagagtccgccgatcccgtgtgcaatcgcatgcacgtacccgacataggcattggtaaacgcgatccctgcctcgtaggaaccggtcagcatattcatccgcgccgctttgttcgcaggctcgcggtaagcagtcagaagattggcaccaatcaggcgcaccgccttcttggcatgcaccttcatcttcggggaacagaaccggttgcagtatgcctccaccgcgtgcgtcagcgcatccatcccgctgtaggcagtcatatccggtggcagggaaccactaagtcccggatcgagaaacgcgtagcgcggtatgagacagtaatccatgatggcatgcttatagtggcatgtctcatccgtgatgacggctgccagcgtcacctccgaaccggttcccgccgtcgtcggcaccgcaagaaggagcggcagctttttgtggatcttaagcatcccgctcatttttctgaccggaagatctctccttactgtgcgcgctcccgcgaccttggcgcaatccatgacagagccgcctccgatggcaaggatcgcctcacagccggatacaaaaaaacattccgctgccgcctccacctccgccaccgtcggatcaggcgatacctctgtgtataacaccgtccggatgcctgcatcctcacactgcgccagaagcggcgcaatcgtcccgcgccggatcgttcccggcgtggtgatgatctgcaccgcttttatcccgtgtgtcttcaatacttccggtatccgggtgatacacccgtccccctgcaccagtgtctgcctccccgccggaaacaggcggagcattcccgcgcagagcgcctgatagacgcggtatatagcatgctttccgttcatctcattcctccctgcccttatgcttctccatctttctgcagggcatactttttcacataatgatgatgctggatcgccacattgaccggggagagcgatgccgacgcacccgtcgcgcgcacatgaagacagcagactgctgcctttgccacaagcgcccttaacgcctccacatcatccgccgttcccgcggataccacaacgccgacacgcggtacaagcaccgccccgtattttcttaaaagtccaagcatatctctgcgcacatgaagacagcacggaatcttcctgccgatcatctgtgccatatcatccacctgcgccgggattccccgtccgctcgccgcgcagagaaggactgccggcgtatcgcagattcccacataatgaaaatgcttctgtaagacgtgaagcagcttttcctggcgcttctggtcttttctcggcttctttttcggctgtcccaaaatgctcctcttacagatctcctctaagagcatggcgcgggaaaacgcctcctccctgtcctttccgcagatcagcacgccgtggtgcaccataaagaccacctttgctcctgactgcatggcatcgtagaccgcccctgcaagcttctccgtactggaaagcccgtatgccgctctcgcgatcccgccgagcttctctgcctcttcctccgtcatggcaagctgctcaaagccgcagagcccgatcgccgtggcataggtctgatgggtgtgaatgacataccccacctccgggaatgtctgatacgccgccagatgcacgcccttctcgctcgagggcttatgcgcgccgcagcacacaccgtttcttatgtccatcagcaccagatccaccgccgtcatcgtctcataatccagcccgctcggcgtgatgacaaaatgattctcgtcgatacggcagctgatattgccccaggttctcgccaccagtcccgcctgctgcagcttttttccctccgctgcgacaaggcgtctcgccatctgttcttccattccagtctcctccgcttctgccggtgcccgctgtcacccggctttttctctattctctattatcttccatcagaagctgttttgcaaccgcatgtgaaacattatatgtccgaagtcccgtctcatttaatgcctcttcattcgcctcgcagtacagctgataccagccctgctttctgtagtccgccgcgccgctttttcccgcatatttttcaatcgccggcgccgcatccgtcgagagggtgtaaagatagctgtagtccaccgtctcctccccggacgcttcccacgaggtgtgcgtcagattgtaggcggcgataaaataatccacatgggaaaaggcaaatacgagatacaccgctcccgccagcacaaatccataccggaacagcgggaactgcggttttacaatctttgcgatcacgccagccatcaaaagtgcaatcaccgccagtgccaccagcaccgacacacgcagaaacgtcagttggtacgcccggatatagagaagcatccggcaggcgctcgacgccgtcataataagcgtgcagcctgaaatggcaaggagcagcgccttcaatactctgttctccttaaaatagctctgaatggaaagcaccgccgccagattcagcacgcacacgaacaaaagctggaaaaacccgcgtctggcgtactccgcgtaagtaacccccgccgggagctgcatgtttccgataaaaagatacacgatctggattgccgaaaacagaagatacagcacggcaatcggcgcggtaaacgcaatcgctattagcggttccgccgtttttccggcggaaggcttaatgtctgccgcgtgcttttgtacataccgcacaccgcagtaggaggataagaatccaaacaccagcatgagcagaatccgaagtagcttcaccgggaaccggaacactcccgcaaaccgcacaagtagatctgcaaataccatgtccgcagacattaaaaggagcacaagaaccatcagacagggcaccgccgcacagatcccgatgagaacataccagcccgcatggctctcccttgtctttttgctgcggtaaaatgctccgccatccgcaaacggcttcccgataaagcagaccgccccgcacaccgccgccacaatctccgccagatattttccgaaattccacccggtatcctgcgcgaagttgtgcagaagaatccccacaagcagcacgaaaataataagatcattcatccagccgatccattcgtttcccgtcagaacggtagagattccaagcagcaccatcatccccaatacaatgccgttgtcccgtctctccttttccccgaacatccggaacacaaaacgtacataccacacactcgccgccacccaaagcaccgacgccagtcccatcacattttcaaacatgcatcccgtgtatacaagcgcgtagagcaggctggcacccgccagcttcccgaaaatctttgcgccttcctgattctcttcctctggaatgatctccttcggattcacttccctgttaagcatgatctcttccatcgcccttctcctccccttcttcctctacatactccagaatatctcccggctgacagcctaatgaccggcagatcttatcaagcgtatccatccggatcgcctttgcctttccattctttaaaatcgaaatatttgccattgtaatgccgactttttccgataactcggtcacgctcattttccgcttcgccaacatgacatctatattgatcctgattgccattctcttcctcatttccggacgatccgcagccgtcctatattgtcaactccgcatcctgcttcatctcatacgacttatagatcagatgggacagcgccgccgcaagcaccgcgatcaccacattgataaaaatgagcagaatcataaaaatcagaaatgccggtccaagcgcccgctttgccgcgaggaacagaattcctgcaaaccagaccaccgccagcacaaacgccagcctgctgattaccacaaacgaccttgcattctcaccggaaaaagaattgtcgcgtccgatctgcacgcagaccttccagaactgatagagaatggcgtagcagaacaccgcaatgccccacccgtagagaatccccggaatgcggagcgccgcgtagtccggatatgtcaccgccatgtcccatgccagatacggcaccaccagcccgaagaacaacagtcccatccctgcaatcgaaagtgtgatcccctttaaccaacctgccacctgtttctgactcataattacctcttttccgcaatcttactgctgtatttttctcacagctttattatatccatgttttttcattttgcaatatatttttattgtttttcgataaattcatatcgttttaaggaaatcttaagaaacaaaaagagcaccgatctctcggtactctccagtggaagcaacggggctcgaacccgtgacctctcgcgtgtgaggcgaacgctcatcccagctgagctatgcttccatatctgctattatagtcctttcgcagaaaaatacaacctcaatttaaaaattcctctttctcgagcaaaagccgcatggcccacggcggcaccgccgcttcgtcatagtcctccagaaacagaaacgcagtccggtagtccgggcgctttgccggataccgcccctttccgtccgtaaaatagagcagtcccgccagctcttttaattctccctgttccagaagatcattgacataggaaaacgccgggcgaaaatccgtgccgcccccgccaaggagtgtaaagtccctaagaaatgcctccatctcctgctcacccgtgatctttgcatcgcttcgtaccacattgtcgcactgtaaaacccggatcacggaacgcgcaaagaaactgtcgctctggtgcaggatgtttgccgtctctcgcaaaaactgttcgaccagttcaccgctggtggaatagctggtgtcaatcacgatcacaaactcgcggatcttctttacctccctgctctcaagcggctcgatgagcggcagattcccgtataccgaaagtccgtacgtgtaataactcagatcaaattcctcagggtcggcatgcagttcctcgtgcagcacggcaaatttctgcaggaaatcccggtagcttcgtctgcttttccccgccgcaagctgcgccgccagaaggtcttcaccgtccttgggcttctctccccgccgctcctgctccatgcgggtctgcctggcgatctgattccactttttctgattgtccgccgcagccgcacactttgccgcatcgtcctcccgcttcggccaatatttgtgactgtccgtgtaaaattcgcgcgctaacgcctgccattcctcacagaccggcattccctccgccggcagcggaaaatagcgctcccacaaaagatcgtagacgacggcagccgacacgccttttttttgttcccgcagttcttcgtacagcttctggcgcgtccagcttaagatccgtttcgtacatttttttcccagaccgtcaatcgtatattccacagcaacatcacaggcgagattccacagccgcctgtcgcggttccccgcaatccacggatgggagaaaatacagtgcagcactgtgtgaagataggcacggtttaggtacggtgcatttttctcaaacacacgcagtatctgctctgtggagtagaacagatgtcccccgtccgtggcaaagctctgcagcgacgcatccgcctgcggcacaagcgccgagaatgcgacgtccagataccgcaattccaggtacagttcgttgcgcacataagaaagtatcttttccgccatctgcacttcccattcttcctgtgtctgtatatgtcccatgccatctctcctcttccggtttctttttcagaataccctgcatccgcacgtacttttccgtgtaaaaacaatcttaaaaatcgtcaaacgaatagcgctcgtccggtgttttctccgcgaaatactgctgcatcagatgaagcagcgccgccgctccctccgcccagtccgcttcccccgcacgcatggcgcacgccgccacgtcctcccgcgtcagaaacttccggctgcagcaatcttccgccagttccagatcccggtcatccgtgatgcggcggatgagataaccgctgtgcgccttcaaatactcctcgtaaagtccgcgcggcgcctccgaaagttccgccgcatagcgcacgcggtcgagtgccagccgtcccagcgttgcctccgattcatccacacacgcctgcgggaaaatcttatcgtactgtgcaaaatcgagcacgtcctcgcggaagctctgtctcgcccggaatccctcccccacaatatttctgccgaaaatatgtgccggcgcgatctcgtcatagctctcataatattccggaaacagcagcttcgcccacacgccattttcgccacttaaggccacttccagatccgacgaaagctgtgccagcaaaagcctgagccccgtcttttgcccggggtccgcatgcagtaacagccgcgacaggctccggcagttcataaatgcatcgctccccagcgtgtctatcccgcttccaagctccagttccgcgagctccgtggcattataaaaagcaaagtttccgatcttttttatgccctccggcagcgtcacgcgcgttatatacgcccctgccagttccgccagcgcaccgtctgctcccggctctgctcccggtgcgccatccgctcccggcatcacgtctgcctccctgtccggcgctgtctccggtacaccgtctgctcccggctccgcctgcatctccccgtccggcgctgtctccggtgcgccgtctgcctccgtctcctcctgcacgtagctgcaccggcattctgccgggagatgcgcctgcgccgcaaagcagtagtccccgatctccgtaatcgctcttccctctatctctgccaggaaacgcggctccggcgtctcgccaaacgcccgaagcagccgcgcgtctccctcatttgtcagctcccagtataacttatagttcatcttctgctcctaatgtaaactctacgctccattatacgaaaggcgtttttctctgtcaaatctgcgtcattccgcccagcagaattccggcgttgtcccggtagatacccgcgaaatccgacatgggaagcggattttctcccatcccggcctcgatcgtgtagcccggtctgtcgtattcctggataaaccagtccttatacccggcatatcccgactgcgtgggcgtctcctccacggtatagccgctgacacgcccaaaatactgcgcaatctcgtaggagtgcgccggttcatagtccagatacttccagtagatgacctccccctgcgtgtgatacgcaaggatcagcctgaaatcatgtgatctggtaaacgcgtacaccgcctcgctctcgggcgccgtcaggggtgcctctcccacgtaatctctgggtgccggcttcgtgtacccctgcgcatatttaattctctttgcgttttcccagcctgccggaaactgtagattcaaatctatgccctcgatattcgccttccatccggacggaaacggaattgccggataatccgatgcaatctgctgcgcccgccggtaatacccgccgtccgtaagcagcccgttcaccagatccaccccgtcgggattgacgagcggcacaaggaaaagccggtactcctcaaacagttccgccgccggcacgccgtagagcgccgttcctttttcgtatgcctgcgcatattcctccgcaaatttgagcagaaccggcgttgtgatgctctcatttgcatgaaaagatgcgttgtagaatacctctttctccccgtttccgatctccagatacgaaatcggctttcccatcacacttttgccgatctccccactcttcaaaaacgggtagcgcgccaaaatcccgtcaatcactgctgctgtgagcagcgatgtataaggcacctccaccgacgttaccgggtcttcaaaaaggatccggttctctccctcctccgtggtgtatcctctcagatacggcagcagcttttcccaggcagatcgatccaccacgcatatgcggtcaggcgtgcggtcggtctgcaaaaaatcggcgagcgcccgacaggtgtccgttccaaagatgccgtccaccaaaagcggataccccgcgcgctttaacgccagctgcatgtaagataccatgattccccggtctccctgatacagatttttcaaattctccttctttccggcacgagaaactcctcccctgccatacgccttcttcttatcttatgcagacactcagccatttagctgtcacttttccacagacgcaaaatggacatgagtggaaaaacagtccgtgtctttccctccatgtccattttaagattgttatagggctctccgcctccggttagcaggcttcgatttccttgatactgcattcgttgcctgttacaagataagtttcatagcttccgcagtgcgggcactgtcttccgtatgtaaccgtctcataggtcttctgacagtcctcacagattgtgaccgccggaagggactctattttcatctcgcactctgcgatcagcggattctttttgcggtaaaattcccagcactccgtcagatattccggcacaatgccgctgacctcaccgatgtccaacgtgacagatccaattttttttaattcgttctccgctgcaacctgatccaatgtctttgcgatatgaacaataattcccagctcgtgcatatgactcctcttaattcttgttgcgcttgatcgcaaactgacgctttaacgcatacggtgcgattgctttcagtttgtcctcagacttccacatacggcttgcatccggcagatcacgtgtcagatggatcgcatcaaactcacacttcgtcgtacagattccacagccgatacacttattctcatccacaaccgaagctccgcagccgaggcagcgctttgcctctgtcttgatctgctcctcggtgagtgtgcagcgcaagtcgcggaatgtctcctttgccacgccggcttttgtacccggaatctggcgttttgcgttgtcaaatgtctccacgtcgatgttgttcttatccagctcgatgaactctctgcggttacgtccgagtgttaagctctgtcccggattgacaaaacgatgcatggatacaaatccttcttttcctgctgcgatggcatcgatggcaaaacgcggtcctgtgtatacatcaccgccgacaaagatatccggctctgcggtctgataggttaccgggtcagcgatagctccgccgttcggtctgatctccacttttgttccctttaacagatctccccagacgatggactgtccgatggaaagcagcacgttctcgcactcaacggtcatcagatcattctcatcatactgcgggttgaaacgtccgtccgcatccttgacggagagacacttcttgaagacgattgccttcacttttccgttctctgtcagaatctccttcggaccccaggaattgtttacagaaatgccctcttcctcagcctctgccacttcatcctttgccgccggcatgatgtcgcgggactccagacagaacatggaaacctcaccggaacctgcgcgcagcgctgctcttgccacatcgactgccacgttaccgccgccgacaacaaccgtacgaccggaaagctttgtgctctcatccaggttcacgcttcttaagaattccacaccggtcttcacgccatcagcgtcctcccccggaactccggccttgcgtccgccctgtgcaccgattgccacgtagaatgccttgaagccttcctcgcggagctgctggatcgtcacgtcttttcctacctctacgccgcacttgaaggtaacgcccatctggcggagaacctcgatctctgcgtcaatgatgtttttctccagacggaacgacggaataccatttaacagcatgccgcccggacgggactctttctcgaataccgttaccggataacccatctttctgcagtagaacgctgcggaaaggccagccgggccgccgccgacaatcgcaatcttctgtggcagatccacgccggttccaagatggttgacaatctccgggatatagcgcttatccgcatgcatctcctgctctgcgatgaatttcttgatctcatcgatggctaccgcctgatcgatcgttcctctggtacatgcatcctcacagcggcggttacagatggaaccacagactgccgggaacggattctcgttcttgatcagctttaaggcatccatgtatctgccttccgctgccatcttcacataaccctgtaccggaacgtgtgccggacaggcagtcttacacggagctgtaccggtctcatagcagttgatctggttcttgtcacggtaatctgtgctccacttctccggtccccactttgtcgcatccggaagttcctgcttcggataagtgatctcaccgttctttgtgcacagcttctgtccgagctttgctgcaccggtcgggcaatactccacgcagcggccacatgccacacagttttcctttgtcacatgtgcgcggtacgcagagcgggacatgttcggtgtattgaacagctgagaggtgcgcagcgcattgcagacgccgactgcacagttacagattgcaaaaatcttatcctcgccgtcgatgttggtgatctgatgtacataacccatcttctctgcgcgctctaaaagttctaacacatcgtcaagttccacatagtgtcctcttccggtctgtaccaggaagtctgccatatcgccgacaccgatgcaccactcgccctcgatatcgccggttccctcgtcgcggactctctgctgcagacggcaggaacactgtccgatcgcatacttgtccttgtattttttcagccagtgggaaatgtgctccacatctgcagattcctgcgctgccggaattgccttctctaccgggataacatgcataccgataccggctccgccgagcggcaccatcggtgtcaccttctctaacggaagtcttgacatattctcgaagaaatcagcgacctctgtgtgcttttccacctgctctttgttcattaccatgaactcggcgcttcccggtacatacatcggcagaatgtactgcttctcatgctgcggattctcccagttgtactcgataattccgacaaccgccatctcctgcagcagcttctccagctctgcctccggcttcttggtcttctttgccagcttcggaagagtaatcggcttgcgcacgtccatgcacagtgccacttccgccatctcatcggtaaccacacctgcaaggccccagtattccggatcgtttaccgtgagcttctccataccaagcttgtacggaatacggtcggtaatctttttcccgagctttaaaatcagttctctttcttctgccataacagtctcctttttccttcgtttttcattgtttttcctgtttttttattctgtctggtctgttttcgtcttatatttgcataaatagtgcgcactctaagagtgcgcatactcatagcctgtgtatacccataaaatatgtatgccgcttccggcagtttttaattattccactgttttacttccgtgcgaagccagtcgtaccacgcatccatcccctcgccggtgcgggaagagatcggaatgatctgaatgttcgggttcagcttcttcacgcgctctttgcatgcctcaatgtcaaaatcaaagtatggaagtacatcgatcttgttgatcaaaagcacgtcgcagatggaaaacattaacggatattttaacggcttatcatccccttccggaacgcttaagatcatggcgttctttacggctcccgtatcgaactctgcagggcagaccagattgccgacgttctcgagaatggcgagatccacgtcctttgtctcgaggctctcaataccctgtctcgtcatgtctgcatccagatggcacatgccgcccgtatgaatctggattgccttcgcgccagtctgtgcgatcgtgtcggcatccacatccgaatcgatatccgcctccatgactccaatgcgcatctcgtcttttaacgcgcctatcgtccgcaccagcgtggtcgtctttccagaccccggtgaagacatcagattcagaagaaatgttctgtctgcctttaactcagaacgaagcacatctgcttctctgtcattgtcttccagaatgttcttcttgatttcaatcaccttaaactcactcattcgtatgcccctttccctgtgccgaggtattcctttgttcggttgcgttctggtcatacctcatgtttgtctaaattttaacacactttttctgtgaaatcaacgctattttgcactatatttacggttctgtttttgtgcaatctgccatctggaatctggtatgaccagttttcttgccagaagacagacttttttatgtaataggaaacttcgttcctattacacaaaaaggagagcagcgcaacaagtgctctgccctccttctttttaaacctgtatgcggtctgcgatttcttttccaagcgccacccgctcattctgcacccctatgatcagactgtcccgcagcttacggatgacctgtatggtctctccctcctccacgtgatgctggcgcagaaaatcgactgcctccggcagcccgaacatccacttgatcgtacatatatctcctgcctgtgcttttgacaatgcatacataaaaaccccctccttttgttcccattgtaagtacctcaatatctgttagtcaatgaaaacattttttattattattcgcattttttatcatttaagcatgaattttctggcattttcattttttcgtgatatgtacgactaatcgttttttctcattttcgctcaatcgcgtgcgagggacagttctcacagcagttcccgcaacggaagcaatgattccgatgaatccggtacggcgcgccctcctcaatgcaccgctgcggacatactgccgcgcaggcgtcgcatcccatgcaggcttccgtgatgtatatcccttctcctttacaccgacatccccaagcgtgtaagtctcccggaaaatcggatttaactttatatccatatcttctataatcggaatatattatctccttccaaactaaaaccccaagctatctgcattaagcagaaaatatttcatgcccatgattacaaatccttcctcatttctccaaggcttttttgttccatttactataataatcttcttaaatgaatccggaatattacggagtgaattaagttcctgtgtctgcttctcctcagaagtcatatcataagctacctgaatataatatctctgactcccctggttcactacaaaatcaacctctaactgcttatgaaccctctttccctcactattctttgcaaatacatccacaataccgacatccacattgtaaccacgcacaagcagctcattataaacaatgttctccataatatgagtcggctcctgctgtctgaagttcagtctggcaatcatcaatgataagaacatttgcacgatcctcagaattcaaaggaagaatggcatccttgatgattcgggttgaaagtattgttgtgaaacggatccagttaatctgaatcattttcataaaacgatatacagtatccttcgcaaaatcaggagtgttccgtcgtgtgatcaggttcatgtacatgcttctgttagaaaaaatcagcagaaacagatactggaaaatttccattactggaacgcctttctttttgtaggcattggacgctttcaaagctgaagaaacatgaaatctcgtaaaaatcttttgatagattttgaaatctgcttatcattttgagttgcttagcggaatgttttgcacaatgaaacttggaatattttttgtgcaatctgccagtataaacttaaatgcaaatcttttgacacccgaatcctttcataaaaaaagagccttccatatcctatgagattaaatctcaaaattcagatatccggctctttttcgttttcttcaaaatttttaatttttacttttctctgtcaaatgccgcgtaagcgcttcttctttcagcaacatttccatgatctgttcatattcaaagatgcactgtagttcttcctcattgaacctgttcagggcgatctcatccatctgcctgtgcatactttcgtcgtatcgctggtgctctgtgtaaaactgctctcccttttcagtcagaaacgcaatgatctgccgtttgttttcttcattcttcctgcgacagacgtatcctttcttctccagacgtgatgcgatctgcgaaactgccccctgtgtaacattcatctctctggcaatctcagacatagtacgtccttcaccgggaccgatcgcgatcacaaagtgtgcctctctcatgtagagtttatcacctgccgtatactcacggtctgaatccatatactgtacaaaagctcttgctgtatttccctgctgatgtaataactttccgattaatttgatacgctgttccttcatctctatcccctccgcatatagaattattgcagacaattccaaaaattgcaaggaaacattttacggcagtaagttaatgttcattcagcagtaaagcacttgctattttgctgcgtatgattttttatttttgcagcattgcaacaaacttcagtgtagagatcacaccggtagataatactccttcatccacatcaaagaaaccattatgatgtgctgcacccgaaccgtaggacggattattaattccaaggtgtgccagtacactcggacaaattcttcgatagcaggagaatgactccgatgcataccatggctcacaagaggaaaccgttacgttctccggaagtacctccggcaatgcagtggaaataagatttgaataatactcatcgttgatcactggcgcacataaaacacagaaacgatcatcaaattgtacctgacaattattcattgcggccgtatgctctgctacattcttaaagattcggacagctttttctccttcttcatcattgaagaaacgcagggaaccaagtatatccgctgtgtccgggatgacatttggtgcttcaccaccctggatactggtcacacctaacgtaaccgttcttccggcagtaatctgattgacccaggccgtcgctgtattggtcagaatagaggctgcacaaaatacaggatttaccgacatatccggtctggagccatgtccccctctgccgataaccttaatgccgactcccgcagcaccagccattcgtggaccggcactaacacaaatctttccggattcaagtcctgcataaacatggattccccagcaaacgtccacaccatgggcgctgagttgatttaacatagccaatattcctctgccatcctcttctccttcttcaaagcagaaatagatcacgcctgtcagattatcacgttgctctgcaagaacacgcatagctcctaataacattgctgtatgggcatcatgaccacatgcatgactcgtatgtgggtcatcggacactacaacacgaggacctgcaaggttatttggctcctccggtaccagaagcgcatcaatatctgcccggagcgcaatacgtgatcctggcttccctgtgtcaagaattgcgatccaaccggtatcaccggctttttcataaggcagaccggcttttttaatctcttcttcaataaaagcacttgtcttgaattccttaccgcttacttcagcaaaacgatgaatggtacgtcggctttcaatcacataatcctgctgtgcttctgcctgcaggcggattatttcattcgtcagcataaaaaccctcctccttttgttctacaaagctgcatttatgtgcttttctgaaattagttatttaatacagaagcgatccgatccagagcctctaccagcgtttttcttgtacagccaatattcagccttaaatgaccttcgccgcctttgccaaaccatggtcccggtacacagatcacttcttttcccataataatcttcttaataatctcttcgtctgtcagtccggcactgccaagatccagccagcataaaaatgtaccctgcggtgctgtaaatcctacattatgcttttgacaccactctgaaacaacctccacatttccctgaaggtaaactaataattcttccagccatgcctctccttccggtgaatatgccgcctgtaccatctccaaaccaaacgtattggatgcgctgtatgaataagcatcaatctcctgatcatactgttttttcagttctgctgaagagctgaaaatattcgcaaggcgaagtcctgctacattaaaggtttttccaagagatgtgcacaccagatgcggtgcatcacttgccagcgcaaacggtgtgtgaacatatcctgcatatacaagatcactgtggatttcatccgcgatcacaaggacattgttctttttacagatctcaccgacacgggcaagctcctcttttgtccagactcttcccaccggattatgtgggctgcataaaatcataatcttcgcatccggatctgctgcctgttcttcaagcagtgggaaatccatctcatatagtccatcattacagatcaggccattgttcaccattactcttcctgttttcttgatcagttctgcaaatggatcgtatacaggttgctgaataataactttatctcccggattactgaatgcacggattgcaacattgatcgcactgacaacggtcggcatcatggaaacaaggtccgtatggatcttcattccaaatcgcttatcaaaccaccaggttaatgcatcataatactcttgcttataagagcaataaccaaaaatctctttatcggctctttctttgatggctcttacgatgcactccgggcatgcaaaatccatgtctgcgatccacatcgggatctcattttccgaaacttctatcggaagatacccctttaatccttccgggcgccatttcacatcacttgtacttctacgatcgacctcacggttaaaatctacgctcatcttcattttcctcttatctttttactgcaattgcctcaatctcaactttcgcattttttggtaaagctgctacttcaaatgctgcacgtgctggaaatggttctgcaaaaaattctgcataaacctgattcatttccgcaaattctgcgatatcagcaagaagtactgttgtctttgtcacatctgccatcgtcataccattctctgctaaaattgcctgcacatttttcagggactgacgtgtctggcttgcaatgtcgttacctgcaaactctcctgttgcaggatcgattgggagctgtcctgatacaaatgcgatgttttcagctgaaatcccctgtgaatatggaccaattgctgccggtgcctgctctgttttgatttctttgtttgccatacttttttctccttaaatgaaatattttttatcttaataaaagcatactcgttttagaaactaaagtcaatatattttagagtctaaagtgtagaaaaaaaacactactttttgtgcaatgtgtttacatatatgaaattattttttaactattcggatacttattgatcatacgctcgatcagctcaaccgattccttgattccgtaacttgcactgtcaatacacagatcatagttgaccgcatcaccccattttttaccggtgtatgcatgataataacgttcatggcgtttatctaacttctttaacaggtgttccgcttgcttgtagtttaagctgtttatttccatcatacggcgtacactctgatcaaacgatgctgtgatgaaaatactgatatgtgggatatgatgattcgtgagtacaacgtccgcacatcttcccataacaataaagtcctcgtgctttgccatatcacagatcagatcactctggttaaagaaaatggcatcctgaaccggaagcccatgatatttcttaaaatctttgaaaaatctgcctgttccggtatctttttcaaatttccccatcatctcttccacatagttaatttgatattaacaacctgatgaaaagagaatttttatgaatcacaatatacagacattcaaaacaagccaacatccggtctatactttcagccggaaagttttcaccgaaggaatgcgggacggatttccgatcgcactcggttattttgcggtatccttttctcttggaatcgccacaaggaatgccggtctgaatcctttacagggatttcttgccagcctcctcaataacgcctcagcaggtgaatatgctgcttttacactgatcgcagcaaatgccacttatcttgaagttgcgatcatcacgctaatctccaatgcccgttatcttttgatgagctgtgcacttgcacaacgcttctcggaagacaccccttttatccatcggctttttatcgcctatgatgtgaccgacaagctgtttgggatcacaattgcacgccccggctatctgaacccgttctctttcaagtggaacaaggaccattcttttgacggtgatcctgtcttctgctgctgcgatcctattcccagtcaccccggaaaaagataaaaatgcaactacctaaattgaaacattacatatatttcactctgtcttcactatcgaaaggagtttttttatgacacacaacccttatttttatattgctgtcatggcacttgtatcttacgcgacccgtgtgcttcctctgactcttatccgaaaaccgatcaaaaatcaatttatccagtctttcttatattctgttccatatattacgttatccgtcatgacttttcctgcgatcatcgaagcaacacaaagtcctgttgcaggtgctatcgcactcgtttttgggatgatcggtgcatggtttggcgcaagtctgtttcaagtatctgtcggctgctgtacggttgtattgatcctggaattaattcttgtatagaaatgtttttctgtccttttccctgtttttccccgtttttccttgtcattcatattttctcatgatatattacatatatatatcattattattctgatatgcaatcattcaaggaggtaccgcatacatggtacaatattacaatacaggggataaggatagtacgaatctcatcgcctatgccagtgatctttccatgttcgctatgctgttcacagatatgcaaaatggaactcgtgactacggtaatgatcgtccgatcaaatctgtcgaagtcgctatcttatctacgattgaacaaaatccagggattaccgtaagtgatttatcccaaaaacaacatcggacaaaaggaactatttcatccattgtttccaacctagaaaaaggtggctacatttaccgcgaaaagcgtcccggtaatgcaaaagtagtgcatctatacactactccggacggtgaacgtctgaataccctttatatcgcttttgtcacaaaaaaaacaacagagatacagtcagaactattaaaggtctgctctatcagtgaaatgaattctttttgtaaagtcttacatgaatatgttaaattattgtcaaaagcttttgatgaagaatcctagcagagagatatttaaaaacacaaggtttttatatctctcttttttctccccaaaaacaggaagttttttctgacatttatttaccgaatcagagtagggtgtcaaaacgtttgcatttaagtttataaaacaaacgttttgaccctccatatccgaatcatgaaaaaagacagagtatccaattttaggacactctgtctttttttattcaacgtatcaacgcttgaattattctttcaacacactaatctttttcttattaattaagcttctttgttgtttgctgcgcggaattttacgattcttctatcggaaataaatgcacaaacaagaccaattaccatagccaaaatacagcttaagaagatctttttgtatccacctacaggatcagcttccagccatttaccacataatgatgtgtagaatgtatccggaatgaatccgattaaggatgagataccgataacactaccaacgatgttcttaggtgttccttcctcatctactgttgcgtaatacagagcacggaatacatagatcatcataagagcaactgtcattacaacaagcattggccacataactgctgtagatgctggtaagatttccataacaatatataaacctgctccaacaacaccggctacgatcataggttttgtggaacgttttaatttagttgctaaaataccagctgcagatgcagcgattaactgtgtaacgatcttgctgtagtttgaatataaaacaccgatttttaccggtaatccacaaatgttctgtaagtatggtgcaaaataagttgtagatgcaagacacatagatccacagaagatcatacctgctaacagatatgtgattggacatttaaatgcaacacccatagctttgatactgtcaagtaatgtatcgtttgttgcagcttcagtattctttggctttggcattaagaatgctaaaagaacaccgattacgatcataacaattgagataagtaatacattgattctcatagcttttgtgctatctgctgcgtttgctgcataaatggatgtaaagataactgtaagtacaagacctgaaacgccacgtcctgcctctaagcttccgaacataccgccctgctctccatcgtcagcgagcatgttgacacattttacagaagatgaccagaatgtaagtacagttgttactgcaaataatacatggatcagtaacaggattgtgtagcttgggaatgttgcttcccaaataccaagaacacctgttgaaaccatggaaaaaataagtaacttcttgcagtcaaatttatctgctacccatccacctggcaggtataaaataacgtttgcaataccatatacgtttaataatctaccatagtcagcatctcttccaataagacccatagcctcctgtaatggtgtatagtatgtatacatcaggtatggcaacatataaatggtattcattgccaggatcataagaatcagagtaactactttactgctttttgatttttgtgtcataacgtttcccctccacgttttctctatcattattttatatgattccgttatatggcagcgcccagccgaataaaaggaagagtgtcactgcaattcctgctgcgatcagaagatatccaaatactttgtcgatcttgtaatcttttattaccttttcagactccggtaatatcagaagtttttcccgatatgctttttcctcctctgtcaccggatgtaattttgatccgagtatcgcaaaaaagaggctcaggtaaattccaataaagaatgggtctaaaaagttaataaatacagttgcaaataatcctacatgaaatccaaccagacattttgtaacaatgaatccaacaaatccggcgatcatagaccatctcgctccggtagcggaaagctttttacttaccacacttccgatggcggaaacgccccagcttgctgcgatgatcgtagatgcaaaataagtaacgatgcggacacttccgattcctgtatatgctaacagtaaggaaatcgcaccgaggatcagcattatcactctgctgacaaataactgctgcttttcacttttaaattccacaaaaacaatatccgatgtaatagaaaatccaatgaccgacaggaatgtggatgcagaagataatcctgctgccataatgccggcaagcatcaatgttccgacaagcttcggcattacatgaaatgctgcccagatcagaactctctgcggatcttccattccagggttaagattcagtacggtcacagactgcagattcaaatacatcaggaaaatcaccgtacatgccgctgcgatcgcacctgcgcggaatgtaacatgctcgctctttgccatcatgttacgtcctgcctgccaaggcgataccgacactgtaataaaccagataattcccatcgtcactgcatacatcactgcaccaaaaacatctgttgccccggctcctggaatattgccatgataatccaaaaggttctccggaatgtttggattattcatgagattctccagcagatgaccaattccaccctgtgccttgaaaacataaggaccggcaatgatcgtcgctattaaaaataccatgaacatcatcgtatccgtaagaataactcctttcgaaccggaataaaaagtaaaagcggtaaaacaaaaccatgccaggaagagacagagctcataagaaagccctgtcagttcctgcattaaaattccaactccggtgatacatgagagcaaatacgctgtgagggaaactgctgtaataattccggcaactctccggtttttcagatcgcagtaacgcgctccgaaatattccggcattgttgtacattctgaccgccttaaatatcgtccgaacataagtggtccggcaatataacccattgcacacatggaatttagcaataccagtgttgtaatgttgccggaatagcaccatccctggtctcccatgaacccgtttaccgaaagcatcgatgcaaacagggttccggcgatcaaaatcgtcggggcatttcttccactgacataatagtcatttacgtcctttacagaacgacctgcccagattccaaccactatgtaaaccagtatgctgacaaccactcctataaagaatatattcatgcaacatcctccttatcttttctaacctttttttcctctttcccaaggacgaaaatcataaggattcctgaagcgatcagacagcctccaactacagctgaaaatagtatttctcccatcgtatcatcctccatttctgtctccagaaactatttcagcaaatttcctgcaattaccatcttctggatctcagaagtgccttcatagatttctgtgatcttagcgtcacgcatcattctttctactggataatctcttgtatatccatatccaccgaataactgtactgctctccaggtaacttctcttgctgtttcagaagcgaataatttagccatagcagctttgtcagagtatggttcgccgttatcttttgcacaagcagcgctatatacaaggtatctagcagcttctactcttgtcttcatatcagcaagtgtgaattttgtattctggaatgctgcgataggacgtccaaactgttctcttgtcttaacatattctacagctgcgtctaatgcgccttcagcaataccaagtgcctgtgcagcgataccgatacgtccgccatcaagagttgccatagcaatcttgaatcctttgttaacttctcccaaaaggttttccttcggaacttttacgttttcgaaaatcagctcgcatgtagaagatccacggatacccattttcttctcatgacttccaaagctgaatccttcccatcctttttctacgatgaaagcactgattcctttgtttccaagttctttgtttgtcattgcaaatacaacgtaaacatcagcaacttcaccgtttgtgatgaagatcttgcttccgtttaataagtagtgatcgcctttgtcttctgcaactgttctctgtccagcagcgtcagatccagcgcccggctcagtaagaccgaaagcaccaagtttttcaccagatgcaagatctggaaggtatttctgtttctgttcttctgttccgaatgcttcgattggccagcagcataaagatgtatgagctgaaattgtaacacctgtgcttgcgcatgctttagaaacttcttctactgcaagaacgtaagacatattgtctgcacctgctccgccgtactcttcagcgaccgggattccgagaagtcctgtttctccaagctgtggaatcagttcttccgggaagcgctcctgctcatctaactctgcagcgattggtttgacaaactgctctgtaaattcaacgaacatgtctttcattaactgctggtcttcatttaatttaaattccatagtgttttacctctcttctcttacttttttaatcaaaaaacctctggctacttcttataaccctttgtattttctgatcttttctgtcagaattggcagaactactttcaggtctccaacaagaccgtaatcagccacattgaaaattggtgcatctggatctttgttgattgcaatgatcacgtcagagctgctcataccggcaagatgctgaattgctccggaaattccgcaggcaatgtagatctttggtccaactgttttaccagtctggcctacctggtgtgcatgtgggatccatcctgcatcaacagctgctctggatgctcctactgtagcacctaatacttctgcaagctctcttacaggtgcaaaaccttctggtccgcctactccacgtccaccggaaacgatgatttctgcgttttccagatcaacgagttcccctgccatctcattgatcacttcgagtaactctacacgtttttctgcatctgtgatctcaactttttctttgatcaccggaatgtcttttacttcacctggttcactcttcttgaatacgccaggtctgactgttccaagctgtggtctgtggtcaggacacataattgttgccatcaggtttccaccgaatgcaggtcttgtccatgccatgttgcctgtctcatcatcaatatctaatgctgtacagtctgctgttaaaccagttccaagtctgcaggaaatacgaggtccgatgtctcttccgttatttgtagcaccgatcagcattacggatggtccgtatttttcgatcagttcgcaaagaacttttgcataagcatctgtgttatagtgctttaattcaggctgatccacaacgattgcttcgtcagcgccgtgtgcttttacagcttcgagtgctggtgcaacattgcttcctaaaattactgcaacaagttttccgttctgtttatctgcaagtcttctacctggaacgagtaactcaagtcctacgcttttcgcagtaccttcatcctctgtttcgataaagacccaaagatcctttgtcttttctaccgccatctcttttcacctccttaaaatactttatcttcgcagagaatggcaaataatttttctgcgccttcttctgatgtcggttcattgatcttcacacctgaagtttttacttctggggtaaatgttttcttaacctttgttggagaaccttttaatccgattctctcattatccataccagcttctaagtctgcataggcgagaacattgatctctgctttctttgcagccatcttggatttgatggtagggaatctaggatcgaaggatggttttgttacggtgatcagacatgggtaagaaactgcaaccttctcaaatccggcttctacttctttcttgatcacaagtctgtcttcctcagcttctgcttcgatcgcatatgttacctgtggaagtccgatatgctcagcgatttcaggtccaacctgtgctgtatcaccatcaattgcctgttttccacagaagatgatgtcgaattttccttctaattcttctaatttcttaattgcgcaggaaagaatgtaacttgttgcaagtgtatcacttcctccaaattctcttccgctgacaaggtatgctttgtctccgcctacagcaagacactctcttaaagcgttctctgcctgtggtggtcccatagatactaatgtaatcttcgtacctggttctttatctttgattcttgctgcgagttccaatgcgtatgcatcaaatggattgacaatacttggtactccttcgcgaatcagtgttttctttaccggatcgatacggatttctgtcgtatccggtacctgcttaatgcagacaagaatattcttcattgcaaatatcctccattcctctctctttatttatatttctttaatacctgacggcttgcaataactgtctgaatctcacctgttccaccggaaatacgtgtgattcttaagtctctataaatacggcttacgcggcttccgcagtatccgattccgcccattacctggagtgcatggtcagcgatatcatttgcagattcagaacagaactgttttgcaatagatgcctctgctcttgtcaggcagttgttatctttgttccatgcgtagtgaagaagcatatttctcatagcttcgatcttcatggtcatttccatgatatggttctggatcagctgtaaacgtccgatctcctgaccttttacgattctctggtttgcgtatctgcatgcatcttcgtatgcacataatgcctgtccatatgcgttgaatgcatcgatcagacgctcgtaatcaaaacctttggatgttgccattaatccgtttccttcgaagctgaacatatcgctttcttcgatctcaacatcatcaaaccagatgtcgtttacgttttccatgtttaatcccattttttccattggctctttcttgcagcctggaacgtttgtaggaacaaaccataatgtaagctgttctggattctcgctgtttttagcaagtgtcagacagtaatcattgtcctgtgctccggaaatgaaatgtttgtgtccattgatgtatacttttccgttacgacgtgtataagttgtaaggattgtattgctggataattcagtacctgcagttggttctgagaatccctgtgcgaatgctccgtttcctttgaagaataaaggcatgaatttatcgatctgctcttttgttccattctctaaaagtgcatcagcttttacatgatcccagaaaaggtagattggtgcgccacagcgtcctaaagcttccattacgaggaacattgtaactgcgccttcgccgccacctggttctccgtcttctccttcagcttcttctggtaagaacatactaaagcatccgagctcttttaagatttcccaccatttctctggatgtgtgtggtttttgtcacagtcctggaagtaaggctcaagattttctcttgtcatagcctcttcgattgcctgtaccattaattcctgttcttctgtaattctgaaatccatattatttcctccattatttttcttaattatattttacatggtttcttttttcattccatgccaaacacttgttattatctgcctttccagtccggtttgcgtttctctaagaacgcttttggtccttctactgcatcttctgttttctcgatgtaatcccagcagcgattgcaatatctctgtgcatcttcgaaagagcactgtgttgctacatggaaaatctctttgctgagttttaatgagatcggtgcgtttgcagcgatgatctctgctaattccattgctttgtccataacctgttctcttggaacaacatagttaacaagacctacctcgtaagcacgctgtgcatcgatcagttttcctgtcagaaccatctcagatgcgatcttcttaggaatgatgtttggtaaacggatcagtcctccgcttgttgccaggaatccgacttttacttcagaaagtccgaatcttgcattctcagatgcaacgataatgtcacatgcaagtgcgatctcaagacctcctgctactgcagttccgtttgctgcacagatgatcggttttgcggaaagacgttctgtgattcctgcaaatccatgtgccataattgtctgacaggttccgttttcatcataagctgctaaatcttctccggaacagaagcttctgtcgcctgttcctgtgataatgatcgcgccaacttccggattctgttcagcatcgtttaagatctgttccatcattgcggatgtttccgggtcgattgcattgcggcgctcttcacggttgattgttacgatcaatacgccatttttcagttcagtaagtactttctttgtttcccccataattgtcacctcattttttctatcatttacagctatctgcacatcttcagatagctgttatgtgctctttcccacttcaatgtggttgtgtcgccatgtccgggacatagggtaatgtcctctatggcaagattattaatttttctcaggctctgcatcatctggcgctcatttccaccttcaaagtccgttcttccgatacttccctggaaaatcgtatctccggtaaagattgcatcctttgtcagaaacagaacggatcccggcgtatgtcccggtgtttccatcacagtgatctctgttcctgcgatcaccagctcctgtccatcttcgatcgtcttcacattcttaaatgccctgactgtcgggaactgctgtcccatatcatactccgtaagactctccggaatatcctttgcattgcaatacaccggaatctctttccatcgttcctgcagcttcggtaccgcaagaatatgatcgtaatgaccatgtgtcagaagaattgcttccggacagatctgcttttcctccaggatggagatcagctttttcggattatctgcaggatcaacgagaaatcctcttcccggttcctgtccttctgcaatataacagtttgtgataaatgcccctaccgggactctgattatctgcatctttcctcctacgcaaaacctgtattctatctgtgatccaagattaaatcatgctgcttccgacaacaccgtctgcaaagagctggtcaatcttttcttcgctgtatccaagtcctgcaagaatctctctgctgtcttcgccaagaagtggtgctcctctccagatcgggcataactcgtcgttgaaccggatcggattgttatagaatctcatctgtccaatcttttcctgatcaacaagtgttgtcgtctctgttgaatttgcatgttctgaagtatatgcttcaataaaaggaagtacttcagatgccggtaccccggcttctgtcaggcgtttttctatctcgctccgtttataagtaacggttactttttcaagttcttctaccaggctgtccctgtttgcgattcttgccgcgttatctgcaaatcttggatcgtcttttaagtgtccggcatctaatgcatcacacatctttgcccagcgttcctcgctgtctgcaatgataactgcccagccgtctcttgcttcgaaaattccgtatggtgcggtgaagcggtcatgattaccgaatcttgactgtgtataagttccttttccgtaatcgacaacagtctcaccacaggagatcattaccgtatccatcataccgatatcaactctgcatccctctcctgtcttacgtgcctggatcaggccgatcagcgctgcgtttaatgcgtgtgttccggttaaggtatcacaatttgcatttcctgctttcattggtgcaccgtccggttctccgttgcttcctgcaaatccgccgcgggctgctgcgattgcatcataacatggatattttttcagaggtcctgtcgctccgaatccgctcagtgatacgaacacgatctttggattgatctttttcagttcttcgtatccaagtcccagtctgtcaatggaaccgctcttgaagttttcaagtacgacatctgcttcctttaccatatcgtagatgacctgtttgccttcctgagaagacagatccagctcaatgctctgcttattcttattatatgctgtataaagagtacttaatccgtttacgaatggatcccatgttcttgcctggtcgccgctgccgtagcgctctactttccagacttcagctcccatatctgcaaactgccatgccacatatacacctgcaagtgcaatcgtaaaatcaagcacttttacatctttcaatggtccctttctgttctctgttcccatagcctttgactctccttattctacaccgtattctgtcagaactgcctgcgtatctgcaccaagcacatgaccaggttctatgttatcaagatcatccgcaccggagaacttcgccggaattccgatctgtgtctctccgcctaccgtgatcatcattccacggtctgcaacctgttcatccttcatcagctcttctactgtattgcaaggtccgccaggtaccattgccctgcggcagatctgatctgcttcatcaattgagatcgttgcaaaatagtcttttaactgctggtcaagttctccgaagtaatgcttcatggaacgatccgggtcgtgtgcatatacgcttccctctccccagtcatccctgccggcctctcttgcaaagtcaagccactgtttatcgcttccgatacttaaagcgaaccagccgtccttacagtggaatgtgtcagtcgggttcgttgtcgggaatccgttgccgagacgtctaggtaacacattcagtccctgcatacattctgcaaaagtatcatcaagctccatcatcgtatgccatgagcttacggaaactttactgccctcgccgctctcttctgctttcagatatgcagccatcattccggctgtgagatgccagcttgcataaatgtaagccagtgggaaaccaaactttgtcggtctctccggaaaaccggtcttctcaagcagtccgcattttgccataacgatcaggtcatagtcaggacaatctttccatggtccttctttaccaaatggtgttaacactccgtaaataagcttcggattcactgcttttaagttctcgtaccccaatccgagtctttccatataatcttcctgtttatttaccgctaccatatcacattttgctgcaagctttcttacgatctcctgaccgtctgctgttgtgtaatcaattgcaatactcttcttgccgcgcagatagtactgtgcatatggtccttcttcctccggtgttcctccccggcgccggatatcatcgccgccctgtggcttttccaccttaagtactgttgccccgtaatctgcaaacacgcttccgatatacgggtttccctcagtgagatccaataccgatactgcttccaaaggtttcatgataacctcctcctgttttgtttgacgtccgaacaattcattttcgtttcaaacatttcgttttatttttatcatacttctattatttcgttattttgaataaattgcaagcttttttttatttttttcgacatttttttcaattatttacagttttattgttgacaccgcgctttattcataataagataagcttacaaatttaacattttgtcccgttttaaatttgtttcatttttcaaaattgtttttttatcatacaatttttaaacaattcaagacaatttgagacgacgcatggtattgtatcttctatttctatgattgaaacagtttaaaacaccacaaaaaataattttaggagcaggtgagcaaatgaaaattattacatgttgtaaagtagtaccggatgaagaacagatcaaagttcttcctaacagagagctggctcttgatgatgtaccagcaaaaatcagtcagtatgacttaaacgcccttgaagcagcaaagaagctttctgcagagacaaagggttccgttaccgcattaagcgttggttcttccaaagctcttgatgcaacaaagatccgtaaagatatcctttcccgtggtgcaaatgatttaaaacttgtgatcagcgacgatcacagcttctctgattcttttgaaacagcaaaagctcttgcagcagcaatccgtgagcaggaagaagttgacctcgttctttgcggaaccggttcttccgatctctacaatcaggtaacaggtatccagcttggtacattacttgactggccaaccttaaacaacgtaacttccatccagccaaacggtgataccgttcttgttgagcgtactcttgagaacagcactgaagtttttgaagtagcacttccagcagttctttccgtttcatctgagatcaacgttccgactgttccagctatgcgtgatatcatgcaggcaggtaaaaaaccggttgcagttcttactacagatcttgcagatttaaacgcttctgcatctactcttgagcagcttgctccagaacagcaggagagacgtcaggaaattatcgaaggagacaacgaagaagcagtagacgctttagttgctttccttaagaaagaagctttataggcttaaaggaggattttagatatgcaatcttatgtaattagtgaaaataatgctttattatccgaactctgtgccggagcaagaaacgttgcttccgatgttacagctgttgttttcggtgatggtgcagctgcagctgagtgtggagcagaccacattcttacatgtccattagaagaatccggttctccggaagattttgcaaaagctatcgcagaagagattttaaaatctgatgctgcctgcgttcttgttggaaatacaatccttggacgtgctcttgcaggaaaactcagtgtttacttaaacacagcagtgttcgcaaccatctcttctcttacttctgaagacggtaaaccatgcttcgagcgtactgtattcggtggaacagctgttaacaaacaggtgattgaaacagcttacagtgtattcactgtaaacagcggaatcttcgcagcagcagaaggaacaggtgcctgcacagacatcgctccaatcgccggtgctgcatccgcaagcttaaaacgtgtttctaaagatgagaaacgtgaaacagctgtaaaccttgttgctgcaaaacgtatcgtcgatgtcggccgtggacttgctgcacaggaagatcttgctatgtgtgagaagctggcttctgctatcgatggtgaagttggatgttcccgtccaatcgctgagaacaacaaatggttaccaaaatcttcctacatgggaatcacaggtgttcaggttaagccagatcttatcatctgtactggtgtatccggacaggttcagcatatcggtggtatcaacaaatccaaagtgatcgttgctatcaataaagataagtccgcacctattttcaaaaactgtgactttggacttgttggagatatgtataagatcatcccacttttaacggaaaaattatcctaatgaaaggcagaaatcatgactgatattgcaggtaaccgcactctttcctctcaatggaatgagactgtacaattttatggtaatcagaattttctggaatatatttcagttgatgaccagcttaccagctacacttattctgaatttcactaccgtgttattcagacagcaaactggtttcattcgctaggaatccgtaaaggcgaactggtggcacttcatctgcacaattcaccagaatatctgatgtgctggcttgcacttgcgcagatcggcgctgtatccgttccgctgaatgagcactatcgcctgcaggaaagcaaattcgtccttcagaaatgtgatatccatcgcattatcgttgagccgtcttcccttcctatttatcagtccaataaagaagatttactactctctaccattattttagcctggggagaatgtccggatccggacattctctctctttcagcaagtagtttttttgacggcagccgactggacgaatcctgcgagattcttccggaggatactgccgtcatcctatttacctctggaacaacgcagtacccgaaaggcgtgatctatacgcactgcaatgtcgtatatggtggtattatccatatgcagcagattggcatgtgccccggagaccgttttctttcgtgtatgccatgttaccatatggattttcaggaaatggctgctatgtccgtcattgttgccggcggtacactgatcatggtagagcattacagcgcacataaattctggaaacagatctgtgatacaaaagcaaactttacagataccatgtccattatgaaccggacactgatgctgcagcctgtacaaccatgggagcaggatcattgtctgaaacaggtctatttttctatgggattaagcacagaagaaaaagatgaattcgaacgtcgattccacgttcagcttctgaactcctatggaatgacagaaacgatttctgccgttacctgttctccgatctccggtgataaaaactggccttctgtagggcgcgctgctttatcttatgatatcaagatcatcgactgtgacggaaaggaagttgccccgggtaaaaccggtgagatctgtgtccacggtattccgggtcgttctcttacaccaggatattacaatgacccaggtgcgacagaatgtcttctggacaaagatggatggcttcattccggtgacagaggatatatagacgaagccggctggctcttctttatcgatcgttggggaaatatgatcaaacgatccggcgaaaatatcagcagcctggaagtagaatgtgttctcacttcccacccaaaaattgctgatgctgccgtaatcggcattccggatccaatccgcaaccaggcagtaaaagcatttattcagtttgccgatggagaaagcctgacgattgcagaattagaacagtattgcagtgaccggctttccaaatttaaggttcctactttctggcagtttgtagatgactttccgcgaacagctaccggaaagattaagaaaaaagagctaaaataatgtattcacaaacgtaaaaacgtaaggaggcctattagatgaagtatgattttacaagtattttaaaccgcgacggcatggatgcaattgcagtaaatccgcctatgaatgccagctggatctcatttgcaccgatcaaagaaggctttgatctgatcccgatgtgggtagcagacatgaacttcccaacagtaccaacgatacaggacgctattatcgagcgcacgaagcaccctgctttcggatatttccgcccacgtcctgaatattttgaatccattatcaactggcataagttaagaaacggtgtaaccgggttatctgaggaacatatcggatatgaaaacggtgttctcggcggcgtgatcagcgcattaagtgttttatgctcgaagggtgattctgttttatttcattctcctacatacattggttttacagccagtctgacaaataatggctacaatatggtcctgagtccacttgtacgcgatgaaaatggggtttggcgtatggactatgaagacatggagcgtaagatcaaagaaaatcatatccatgctgctgttttctgtaccccgcataacccaaccggtcgtgtatgggagcgttgggaaatagaaagagcaatggaactcttccaaaaatatgatgtatttgttatttctgatgaaatctggtctgaccttatcttaaatggccacaagcatattccaacacagtctgtgtctgaagatgcaaaaaaccgtaccattgcattatatgcaccatctaagacattcaaccttgccggtctgatcggttcttatcatattatttataattcatggctgaaggatcgcatcgacaaagaatcttccctctgccattacaacgacatgaatgtcttatccatgcacgcattgatcggtgcttataagccggaaggtcatgaatgggtagacgaattatgcgaagtattaacagaaaatgtcaatatcgcatatgacttcttcagcaacattgatggtattgatactgcaaaaccagaaggtacttatatgcttttccttgactgtaaaggctggtgtactgcacacaaccagacattagaagacctttacaaaaaaggacagtctgtcggtgtctactggcaggatggacgaccattccataatgagtatggaatccgtgtaaaccttgctcttccaaagagccgtgttgaagaagcattaaatcgactcagaaactatgttttctgtgactaaagctttttcctatataatatatatttaccatattctttcgctgcagccgggttcctccccggctgtaaattttatccaaaaaagcagaatgtttgcaaatcaaacattctgctttttatttcttatcaaaaatccctacgccaaatttccccagtcctctattcatagttctttaaaacattccgtataactatttcatctctacatcagcattttcaaaaagaaagagccgctgtataaatacagtgaccccctcttggaatgaatatcgatttatgtatgtagattaatttcttggatctaaaccgcagttgtgagcgaagaaatgagctcctctgcgtaatgcatcttctgcgtcatccataactttgctgtagtggataaatgcgtgaagagcacctttgtactcatggtattcagcctggattccgttgtttgtaagaatctcataaagtaacttactgtcatctctcagtggatcaagttctgccgaaacgatgaagcaaggtggaacatcatgtgtaaggtcattgataaatgtatcaaagtatggacaatctataggatctacgccttcgccaaggtaaatttccaagtagaatgcaaggtcttcctcgctcattccatcccagcttccaccgtgaaggttgctgctgacactggctttcataccataagatccgtagaataaaatgttacctttgattctagagatatcaaatccatcatcacgtaagtgcattgtaacgcccatagaaaggtttgctccgccggaatctcctgcgaatccaaatttttctggatcaatgccgtactcttctgcatgctctaatacatatttacaagctgtagtacattcctcaatcgcacgaggataaactacttctggtgataaagtatattcaatacctacaacaacacatccggaataagctgcaagctttctctgtaccagattgtgtgtatcgttatcacctaatacaaatccgccaccatgcataaagaagataactggaagcttctcagcttttactgggcgaagtaaacgtgctggaactttatcctcaccaaaaggaatctcaaagtcgattgtctctgccatttctggcccgccgctgttccacatctttctctcttcgcggtatgctgcacgcatctcctcgtaagttcctgcctgagtatcgaatgctgctgcatattctgcctgcatctcaagtactcttgcctgctgccagttcacctctggtgtagctggtttgttttttggattaattgttactctaaattcccccatcgtgtaacttcctttctctttacataaaaatttttacacacttttcaacatacaaccttttgacaaatacagcacaaatcccccccgattttccatctgcatttgtatcttttgtacatttcttatatccttattataagctcattatgttcagttgtcaaacaaatatcgctattttttgtatgtttttctaaattctcatctatcttttgttttaccgtcaaacaacccgtcttttttcatgaaatgcatcactttttgtacctcggactattttttccacatttttcaatcttttttcatccaaatccgttgccttcattcgtcttttttatcaaaaaaataaaaacaatatccttcctattttgatacccgaatcctataaaataatgaaaactatattttatgtaaaaatgatgtctggctttgatacggatgtgtttcacgccatcctcatcagagtaaagattaaagttttctatcactgtattcttgacattaagaacattcttgcataatgtattagcagaaaccatttgcgttatccttttttctatttgcttggtcgctaatacattaaaggaaaccaaatggttttttcaatatgtaaatgtaaatttatggtgtttacatacttacatactgcaacacactcttctatcgcaaccggataccttacttccggtaccaaaaaataatcgataccaattacaacacatccggaataagccgcaagttttctctgtaccagaccatgtgtatcattgtcaccttctacaaatcctccaccatgcataaagaaaataaccggcagtttctctgcctttaccggacgaagtaaacgtaccggaaccgtatatccttcataagggatctgatattcgatcgtttcttccatttcaggaccaccgctgttccacatctttctctcttcgccgtacgctgcacacatttcatcgtagcttccagtctgagtatcaaatgcatctgcgtactctgcctgcatctcaagtactcttgcctgctgccaacctactgccggtgcagccggtttgttgataggattcattgataatttaattcccccattttgcagctcctttatccgtgtgcattctttttaacaaatacagcacaaattccccgatcaaacatctgtatttgtattttcagcacactcccgacacctttattatagtacattatgtttaatcgttaaacaaatatcagtctattctacttgtttttatattttttcactaaatttatttttatttttgtttgatagcaaaatggctcaaaattattcaaaaaaatcgtttgttttgcaatattttttctgtaaattcatgtgaaacaaagcggacaagtccgcttcaagattcctgaatcccttaatctttgaggtacttgttacgctttgcgcgccagatgcattctgctttagcagacatattccacatgcatctggtcgcatcctcgcggagcgttttttgctttattggaacattacagagtaaatttcctataaagcaaaaagaggctatcatattctctaatatgatagccttccgtctagcgtagtaccctgcaattgcaattaccacgtaatcatttattcatttcttggatctaatccacagttatgtgcaaagaagtgagctcctctgcgtaatgcatcttctgcgtcatccattactttgctgtagtggataaatgcatgaagagctcctttatattcatgatattcagcctgaattccattatttgtaagaatctcataaagtaacttactgtcatctcttaatggatcaagctctgctgcaacaaggaaacacggtgggacatcatgtgtaagatcatttgcataaatgtggaaataaggacaatcaaaacggtttacatcaggagcaatataacaagatggtgaagataaatcagcttcactcattccatcccactttccgccatgctgatagctactaatactactcattaagccatatccaccatagtataagatattacctttaatcttggacacatcaaagccttcatctcttaaacacatgcagactcccatcgccatatttgctccgccggaatctcctgcaaatccaattttctccgggtcaattccatattcatccgcatgctctgatacataatggcatactgcaacacattctttgatcgcacgaggatatttaatttccggcgcaagggaatagtcaataccaatcacaacacatcctgaataagctgcaagctttctctgtgccatactgtgtgtatcattatttccttctacaaatccaccaccgtgcataaagaagataaccggaagtttctctgctttcaccggacgaagtaaacgtaccggtactttatctccttcatacggcacatcaaagtcaactgtctctgccatcacaggaccgccagtgttccacatctttctttcttcattgtatgctgcgcgcatctcttcgatcgtgtttaccagcgatgtatcaaatgcagctgcatactcttcctgcatttctaatactcgtgcctgctgccagttcactgccggtactgccggtctgttctttggattgatttgcagtttaatttctcccattttgtaactcctttctccatgtgacttattttgacaaatccgtcacaatacctcaacattgctcatctgtttttgtatcttttatacacttctgatactttatattataaagtattttttcactatgtcaaataagtatttgcattttttctatttttttactgacaaagtcaactccggtacctgactctatctaaataaataaagctggtatcaagcactccattatacttttttcggataccaataatattgtatgtttctctattttatatctgaagaaatttcataattcatagaccttgattttgctgatgttgcggagcatataaaaaacaacttacctcgatccgatatatattttgacaataaatatccacatccaaaggagataagttgcaaaatatgtatcgtcaacaatcgttaattaagaccagttctatgaatggattatatctatcgtgaattcaccttggatttcttcaagatggatcttaattctctgcctaaaaatgcatcctctcttaaattttccaagttcaattctaatgtaatggggctttgtttaaccatgcacgtaaatcttggaatgtctcttcgtaagacctaatatgccttaaaagaactttacaacattgacatatcccaccaacaggtagctaacttctgtaagacagttgctgtctgcatcaaaccattcgtagacaactacgattacaatgcaagaaaaatctttactgccgatgaaacctacataaaaatccgtggaattaaagcatacatctggtttattatggatgctgccagtcgttccctttcttggataccgcatatctacggagcgcgacgttggtgcatgcattctttcgatgcgtatggctttcaaacacgtctccaagcttcctgaaaatttcaaatttatcgctaatggttacagcgcatatcctcttgccgcccaacagttttatcgtgagttcaaagaagattttaaatttgatatcaccaggattatcggtcttacaaacggcgatgaagtttctaaagaataccgccctttcaagcagatgatagcgcgacttaatcgcacttataaagctctctatcgtccaaccaacggttttgacaacgtagacggagccaactatgatctagcgctttgggttgcttactataacttccttcgccctcacaaacacaataaatacaaggttcttaatgatgttgagatgctacatggtgcttcaaacatgcctggaaaatggcaacttctaatctttctcggtcaacaaacaatcctgaacttacaaaacggcgaagccgctaactgttcttagattaagagccaaaggtaataacccagccatcagaaccacaggttctgacaagacatttatgcctttgcccttgatggcacgaaaaagaactgctacactgctgtaatcgacataagaaaacaactgttcttaagttcttcgccgtcggtaatcgacctacagcggttctttttcgtgctgtcaagggtggcggcaagctgccactacctataatatctacagttttcaaagttcatctgagcctttttctttaactcggttttttcattggtcatttgacactatcgcaagccacaggtctacagcaggatttttgctctgtgggacccgaaaatcgccgatttacgggtcccacggaacaattttagctccctgtgcccaaaaacttcgttttttgctgctttcttcccgcttttatcggcattttcgggtcccagacggctattttgtctctgtagacccgtgcatactcccggacatctcattgttcctgacaagacagcaaaaaaacaaatacagctttcctgacaaggcactaaaaacaggactcctaacaacacaacaaaaaacaaatacagctttcctgacaaggcaaaaaacggtccatgacatgcgtcatagaccgtttctgttacattctttagttttcgttcatcttcgcaagcttcgccgcctggtccgccgcgatacatgcatcgatgatctcctggatgtctccgttcatgatcttatccagtttgtacagggtaagattgattctgtgatccgtcacacgtccctgcgggaagttgtaggtacggatcttctcggaacggtcaccggtaccgatctggctgcggcgcatctccgcctccgcatcatggcgctgctgctgctcaatatcgtagagctttgcctttaaaagagcaaacgcctttgccttattctggatctgggacttctccgtctggctgtacacgacaataccggacgggtagtgagtcagacgcaccgcggaatcggtcgtgttgacacactgtccaccgtttccggaggcacgcataacgtcaatacggatatccttctcatcgatgacaatatcaatgtcgtcgtccacttccggcattaccgccacactgatcgtggaggtgtggatacgtccgccggactccgtctcaggcacacgctgtacgcggtgcacaccggactcatacttcatcagggagtatgcgccctgaccgttgatcataaaggtcacactcttcataccgccgatgccggtctcgtccgcctcaacaatctcggtcttccagttcttgctctctgcataatgctgatacatacggtaaatctccgcagcgaaaagtgccgcctcgtccccgccggcaccggcacggatctccacgataacattcttatcatcattcggatcttttggaagaagcagaatctttaactcatgctccagctcctcaacacgcgccttggcatcgtttaattcttccttcgccagttcacgcatctcctcgtccgactcctcatccagcatggcgagggaatccgcaatattctgcttgcactgcttgtactccttatatgcagcaacaatcggtgccagatcactctgctccttcatcagcttgcgaaaacgctccggattgttcgcgacatccggctcactgagctcgctcatcaattcttcaaaacgaatcagtaaatcatccaacttatcaaacataacaaacatcctttcttatctcaaacaccagacaaccgtctgcaccaactatgcaaaattctctccaatcccgcaatcaactaaagcattccggtcaccacacggtcttttctcgccagatcctttatcacctgcacatcatggaacccgatctcccgcataagtgcagacaccttttgcccctgatcgtagccgatctcaaacaacagatgtccttccgggttcagatactgcttacactgtccgatgatcttcctgtaaaaatacagaccgtcctccttgccgtccagcgcttccatcggctcaaaatcccgcacctccggcatcagctttgcaatctcatccgtacagatatacggcggattcgagacgatcacatcaaatgtccccgtcacgtgatcaaacaggtcgctgtgttcaaacaacaccggcacatcattgagccttgcattttccttcgcaacattgagcgcctgcttggatatgtcaaccgcatacccctccacatccgatacattgtgcagaatactgacaatcacgcatccggacccggtacacagatccagtacacgcattccggggcgcacgaccttcagcgcctcttccaccagagtctctgtatcctgtcttgggatgaggacactggaatttactttgaacttcagtcccatgaattccgtctcacccacaatatactgcagcgggacatgctctgcgcgcttgcgcagcgcaatctggtactcgctcatctgctcttccggcatatcctcttccatatgaagataataaaaactgcggtcgatcttacacaccatttcgagcaaaagccatgcatcggtctttgcctccgcaatatctgccatggagagaactgtctcccccagatttactgtctcacgatacgtcatttccaacctccatcatgcctgttcccggatctctttcacgtaagccttccagtcagacaccgcctcaacagaggcatttccaacctccatcatgcctgttcccggatctctttcacgtaagccttccagtcaaacaccgcctcaacagatgcaattccaacctcgatcatcgaatcatccggctctcttgtcgtaatccgctgcagcagaagccccggcttgctgaacagattgacaagcatatgatccgagcgtccggcaagccggataaactcgtacgatacccccgcaatcaccggaattaacaccaggcgcagcagaagctgcaggatccggttatccacgcggataaataaaaagaagacaatgctgatcagcatgacaatcagcagaaagcttgttccgcagcgcttgtgcagacgggaactcttccgcacattctccaccgtaagatccatcccctgctcaatacagttgatgcatttgtgctctgcgccatgatacatatagacacgcttaatatccggcatcagtgaaattgccgccacatatccgataaagatggtaaggcggatcacgccttccaacaacgcaagaagtgtctgcgatgtaataaaacgctgaaagaatacggatatgtaatatggaagcaccataaaaattgccaccgcaagaacaatggaaattgccaccgtaccgcccatcagtacattctcctgacgcttttcctttttcttctgctcttcttccgtcggcgccggttttttcgctccggcacgcttctccgctttccgggatccgctcttttcatcctcttcctcctcgaaaaaggatgccgagaacgtcagtgtcttcatccccagtaccagcgattctataaaactgaacacgccccgcaagatcggcatgtttcttattttcttatttttaatcagtccttcgtacgtcgaggtctcgacgacgatctcctggtccggcttgcgcacggctaccgcgtatttttcctgattcttcatcattacgccttccatgaccgcctgaccgccaattcccgaatatctcatagtctaaatccctgcttccggcacatgagctgcgccgtattccataaggtaaaaaaggttgagattaaacaacctcaaccttatctgtaaccgttttcacttaggagcataacgcttcacgcgccatactactgctgctgcataccatatttcttattgaacttatcaatacgtccgcgagcctgagctgctttctgctggcctgtgtagaacggatggcacttggagcagatctcaacgtggatatcttcctttgttgaacctgtaacaaatgtgttaccgcagttacatgtaacagttgcctgatagtaatctggatggattcctgccttcatgattttcacctctttataatcttatcgttattatgttcctgtctgtctctattctcttatgcccgtatgcccgatccgcatatggcacttactgcaaagaatagtcccgaataaacagcgttgttattttatcatggtttttacgaaaaatcaagttctttttatacaatccggttctttttcaccatatggatatattcctgattgttgcgcgtgcgggcgaacatgttcagaatgttctccaccgcctcatcggtgcgcatgccgttgatcgctttgcgcatgatctcgacagcctcctgctcctccggctccagcagcagatcgtcgcgccgtgttcccgacttcacaatgtcgatggcggggaacacacgcttctcggaaagcttgcggtcaagcaccagctccatgttgccggttcccttaaactcctcgaataccacgtcgtccatcttgcttccggtatccaccagcgcagtggcaaggattgtgagacttcctccctcacgcatgtttctggccgcaccgaaaaagcgcttcggcatgtgcagcgctgccggatcaagacctccggataacgtacgtccgcttggcggaaccgtaaggttgtaggctcttgccagtctcgtgatgctgtccagcaggatcatgacatcctttccgtgctccacaaggcgcttggcccgctcgatcaccatctcggatacgcgcttgtggtgctccggcagttcatcaaacgtagaataaatcacttccacgttctccccgacaatcgcttccttgatgtccgtaacctcctccggtctctcgtcgatcagcaaaataatcagatgcatatccggatttccctttgtcactgattttgcaatctcttttaataaggttgtcttacctgccttcggctgggaaacgatcataccgcgctgtccctttccgatcggcgacaccagatccacaatgcgcattgcaacactgcagcccgggcgctccaagcggattctccggttcgggaaaatcggcgtcagatcctcaaaattcttgcgcttctgcgcgacactcggatgataaccattgactgatgaaacatataacagtgcagaaaacttttcctgctgcgtcttcacacgggtatttcccgccacgatatcgcccgtcttcagattaaacttgcggatctgtgacggcgatacatagacatcgttctccccggggaggtaattctcacagcggataaatccatatccgtccggcatgacctctaagataccgttcgccataattccgctgtccaaattggagatcgtctcatccgctgcggtgctctctcccttcccctctcttgtctctctcggctcacgcgccggccgctgctgcgcctgctcacgctgcggtatctgttcccgctgcgcctgctcacgctgcggcgtctgctcacgctgcggcgtctgctcacgctgcttcgtattctcttctctgccctggcgctcgtcctctgcaaccatcagatctaccagatcactctttttcatgccggagatatttttgagtcctctcgcttttgcaagatcacgcaaaacaacggctgacaagctctcatacttttctctcatccattcgctcctgttcttatcaatctgctattttcctctatgctctcaatcgtattgggaattgtgtctgaactgacaaaatgaatttacaatatgcgtattatacaacactttttccaaaataggaagtcctaatttccttgatttgtcaaaatgataatggtatgatttacatattgatttttatacaaaaataaactttatatacaggagacgatatcatggagaatcagacaatgacacttgccgagaaggcattgcttatgcatgaaaaatggaacggaaagcttgagaccatcgcaaaatccaaagtaaactcccgcgaggatctcgccatcgcatacacacctggcgttgcggagccatgtaagatgatcgccaaggatcccgaagctgcttacaaatataccatgaaagcgaacaccgtcgccgtcatttccgacggaagcgctgttctcggtctcggcaatatcggcgcatacgccgccatgcctgtcatggagggaaaatgcgttctgtttaaggaattcggcgatgtcaacgccgtaccgatctgtctcgatacccaggacacggaagaaatcattaccacaatcaagaacatcgcacccgcatacggcggcatcaacttagaagacatctccgcgccgcgctgctttgagattgaggagcgcctgaaggaaatgctcaacattccggtcttccatgacgaccagcacggcaccgccatcgtggtgcttgccggcatcatcaacggtctgcgtgtcaccggcaagaaaaaagaggactgccgcgttgtcgtaaacggcgccggctccgcgggtgttgccatcacaaagcttctgctcacctacggttttcgccatgttaccatgtgtgaccgcgagggaatcatcggcaaagattacccgaacttaaactggatgcagcagaaaatgactgaggtcaccaaccttgagaaccagaacggcacacttgccgacgccttaaagggtgccgatatctttgtcggcgtctccgcaccgaatatcgttaccccggagatggttgcctccatgaaccacgattccatcctgttcgccatggccaacccggtacctgagatcatgccggatgtggcaaaagccgcaggcgccagaatcgtcggaaccggacgcagcgatttcccgaaccaagtcaacaatgtcgtggcatttccgggcatctttaagggtgctctcgagggacgggcgacacagattaccgaggagatgaagcttgccgccgcagaggcgatcgccggtcttgtctccgacgaagagttaaacgacgagtttattatgccggaagcatttgatccgcgtgtggcgcaggttgtcagcgaggcagtccgctcccacatcgtgcgctgaccggatatccaatgaacgacgcgcgttactactctctcaacacctatttaagacagacattcggtgagaaggtctaccgcctgtccttaaacggcggtatgacctgtccgaaccgtgacggcagtatcggtaccggaggatgcattttctgcagtgccggcggaagcggtgattttgccgcctccccgcagcaatctgtcaccgggcagatcgcgcaggcgaagcttctcctccgtgaaaagacaaactgccgcaaatatatcgcctattttcaggcatacacgaacacctacgctcccgtcggtgttcttcgtgcactttatacggaagctctcgcacagccagacattgtggcgctctccatcgctaccagatgtgactgtctgccacccgatgttttagatctgttagcagagttaaataccataaaacctgtctgggtcgaactcggtcttcagactatccatgaacacactctgcgttttatacgcagtggtttttcactcgcccagtatgagcaggcagtatccgcgcttcacgcgcggggcatcaaagtcataacccatctgatcctcgggctgccgggggagaccaccgatgacatgcgcgcttccgtgcgctatcttgccgcgcaccccgtcttcggcgtaaagctgcagctgcttcacgtcttagagggcaccgatcttggaacactctacaaaaatgacccgtttccactttttacgctggaggaatactgcgaccttatcgcagactgccttgccctccttccgccggaaatggtcattcaccgtctgaccggtgacggtccgcgccgtctgctcctcgctccgcaatggagcacggacaaaaagcgcgtgctaaacaccatccacagacagctcgcaggacgcgatctctggcagggcaaatattatagaaatgaggaattccatggctgaaccatttaccatatacaaactgaccatcttaaacatgctcgacaaggtcgattttccgctgaccaacacgcagatctccgacttttttctggagcaggaatacacggattatttccgggtacagcaggtcttaaacgatctcgcagactccggtctgatccgcacggaatccacacacagcaacacgcagtattacatcaccgccgcggggcgtgagacgctcggctttttccgcgacaagctcacggacgcgatcgagcatgacaccatcgcctattttgaaaaaaataaaatggcgctccgcaccgtcaactcgatcatcgcagactattacaagacgccgaatcaggactatgccgtgcgctgtcagttccgcgtccacgataccaacttaatcgacctgacactgaccgtcaaaaacaaagaacaggcggaggcgatctgcaacaactggaaaaaacagaacgaggatgtctacgcatatctgatggacattctgatgcaatagacacagatatttttcacagacagaagggagtccttattttatgggaaaaagtgctttcaaacccggcaacatgctctatccgctgcctgccgtcatggtaagctgccagtatcccggcgcatccgatccggaatgcagcaatcctgccctcgcaggcagaccgaacattcttaccgttgcctgggcaggcaccgtctgcacgaacccgccgatgctctccatctccgttcgtccggagcgctactcctaccacatgattgagaccgccggtgagttcgtggtaaatctcacaaccgaagcgcttgtacgtgccaccgactactgcggcgtgcgctccggcagagacgtcgacaagttcaaggagatgcatctgacgccgcttgcctcccgtgaggtatcggttcccggcattgccgagagtcccgtcaatatcgaatgccgtgtgcgccagatcacgccgctcggcagccacaatctgatccttgcggacgtcgtcgctgtcaccatcgatgacgcgtatatggatgaagccggcaaattccacttaaacgacaccgggctgatcacctactcgcacggagagtattttcttctcgggaaaaagctcggcacattcggctacagcgtccggaaagacaccccgggcaaaaagggaaacggtgcaaaaaaaggaactcccgggacaaaacggactcctgcaacaaaagagttttctgccaaaaagggaactttgtcaaaaggtgggcagcaagaaaagcatgaaaaaggatcaaaataatttcagataacgaagggatttttacgatgaagataagatttggtattgtaggctgcggttttctcggaaacattgtcgcaaacgcctggaaggatggttttctggaagattacgagcttgtcggcgtgaccagccgctcacaggaatcgcgcgataagaccgccgcggaaaccggctgcagatcctgtcgggatcttgcagaactgctctccttagagccggaatatattgtggaggcagcgtccgtggaagctgtccgggatatggcatgcaccgtactcgaacacggcgtcagcctcgttctcctctcgatcggtgcttttgccgacgctgccttttacgggcaggtcagggacgcagcccgcagaggatgcgccaaagtccatctggcaaacggcgcgatcggtggttttgacgtcttacagacgatcactttaatggcgcaggcgggaaagcttgacgagaccgccggcatcgagacgcacaccggtgcccgcggttttcgcaatacaccggtctgggcggaacaccttttaaccgataccgaaaagacgactgtctttaccggcagcgccaaggaggcgatcgtaacctttccgcgccgcgtcaacgtcgccgtcgccacctcgctcgccacgacaggacctgacatcacgcaggtaaccatgcactccgttccgggctggacgggcgatgaccactgcatcaccgcagagatcgacggcgtcaaagccaccgtggacatctgttcttccaccagcgcaatcgccgtctggagcgcggtagccctgctccgcaatctcgcctcgccggtttgtttttattaacgcctgctaatttccaaaaagtcctgacatccagtcattgaactcttttacttttaatgtcacggaatcgaccgcatcggaaagctctccggcactctcgagcatttcctgcgtcgttccgatggcatcattgataccatccacatcgacctgctgcagtttatctgccgcctcactcattgctgccgtcatctgactcatccggttgacaaaaaatccacccgcaataagcagaattaccagcattaccgccagcagcccgctgataagcttctgcattttcaactgttttttcatcacttccaacatttcttccatattacaatcttgcctccgattctcactcatccaacactgcttctatactatctcataaacggactgttcatcagttcctgttttgctacttccatcgcacgcgccacgctgcccggctcaaacggattcgacaggtttgcatagcgcaatgtctccagatagctcatgcttccgccgcatttgcagagatttaagtaatcctgccatgccgtctcatggttctcataatttttctttttgaactccatcgcccccatcgtggtcagcgtataattgatgtagtagaacggatagagatagatatgcagtttgtggtaccagaaaccgccacggtcgaagaaatcatccgcgtcgtattttctccacggcatatacttttcttccagcttcttccactctgcggtgcgctccttcggcgtcagttccggattggcgtagcagatgtgctggaactcatccaccgccacgccgaacggtacaaatgtgatcgcctcctgcaaatgtgcaaagcggaacttatccgcatactttccgaaaaatgcctccgcatacgggtaggaaaactgctccatcgacatggaatggatctccgcgatgtcggtggactcggaataatactctgtgatcggctgctcccgcatcgccatgtaccccgcaaacgcatgtcccagctcgtgtgtcagcacctgcatgtcaaagattgtctgattaaaattggagaacacaaacggtgcccgataatccgggagaaatgtcatatatcccgtagcagcttttcccggcttattcttcaaatccatcagttcgtgctcaatcataaaatcaatgaactctccagtctccgggctgatcttatggtacatcttccttgcctcttccaccataaaatcatcatctcccgcaggaacggcatttccatccggaaatacacgcttctcatcataaaacatcaatgtatccacaccaatccgcttcgcctgcgccgcatagagctgttcacacagcggtacgagttccgtacgcacctgctcgcggaacgctgccacctctttttccccataatccgtgcgtccctgctgcatgtaccccaccggaataaagttggcatagccgaggttcttccccatctgattgcggatggtaatgagttcctcccagatctcctccagccgcttctcattgctgtggtaaaaatcagaatatgcccgcacagccgcacgccgtacttctctgtcctcatgttcaaaatacttctgtacaccatagagattaagcgtctgcccttcaaattcgatcgccgccgttgccatgatcttctgatattcgtttgtcagcttcgcctcctgctgcatcagcggaatatttgcctcacagaaagtcttcctgttcagttccttctgtgcaaaatactgtttcccgtactctttctcgatgtcatcgcgaaacggactattcatcactgccgcatcaaatgcaagaaacttcggcatcacggtcggtatggtattgttgatatattcgtcttccttctcataataagtatccgtcgtatctaatgtatggcggatggacgcaatcgtgcacgcagtcataagcttattctgcacgcgctctgccttctttaagagttcctttaatccctcataggaggctgcctcctgtacctgttttaccagtttttcaaaaagctgttccacttctgtgaaatccggtctctcgtatttcagtgttgaaaatgtaaaatctgccatatgctcctcatttctgcgcaccccatcgcagcaattcttctcctgcaatatccgtagcgcttctctctttttcgttttattctacgttccgcagcttttcctgtcaagcaacagccggtaaccggcgtccatgagcaccatgcataaaagcatcagaaccgcatagcctgccagatagcccgggttccccagaaacgacgccagccactccagcggcgatccgggcgaaggcacattcacaaacatgtaattggcatgaaactttttgtcaaacaggtaaaccggcggcacaaccaccagaagaaatacgatcaccttccacagcgccgcaagccgcgggataatgttgtgctgcaacagctggcagatcacgtagagcacaatcccggcatggaaggtaaatccctgtatcgtaataaaatgaatcgccggatagcgcacccagtccgggaataaaagcgcaagcacggttcccggcagacacagggtatagagaacctgtcccagccagtcccatttgaaaaaggcgtgaagacagcacaaaaaccctgccatgctgcacaggtgaagcggcagttgatacagcgacattttcccgatcagagccagcaccgcaatccggtacacttccagtcccaccagaaaaatgccgattcctctctccgccaaaagcctgcgccgtcctccccatcgcttataataatggaggaacagcagtaagagccccgcgcacacgcccagccataataaatgtaccggaccaaagtgggaaaatcccaccccgtccggtatctcatcttcatatgtgaaaaaataggaaagatcaatccccagtcgtctcattttcacacgcttctttcacagtgtttttctccgcggaatttccctccgcctagtctctctttgcaacttctccttctgtcgaatgttcctccgcagattctctctctgcagattctgcttctgccgaatctctctccgcagattccctctccacagagtctccttccgcagaatgttcctccgtagtatctgcattcgccggactcttatgcgtctcatccgcagattctttcttcacaaacttaagccgcgccagcttctcgctccaccatgcgcgccagcgtgcatgcctttctgcccgcgcctccttccgctgtctgcggcgctcgtcccgctctgccttcttctgcgctctcgcctcttcctttctggtaaacttcgcctgctttttctcctgcttcgcgaacgccctttccttcagacgcacttcctttagcgctgccttctcgatctctacgatatagcggttcgccttcttgcggttcctccggtccatccggtacggatcatacaggaagtaggacagtgctccgatcatgagcaccacaacacctgccacggcgaaaaccggtaccagaagcgcatattcctcaaaaccaagttcgtagcaggtaaacgtcacgagcataaccggaaacagcagcagatacacgcccttcgtcagcaccgtaaaaaacagtgactgcttcctcccgttggagagcaatgccccctcaatggccgtataaaatgccataaaaatgcagatctccgacccgaacccgtgcagtatgccgcagatcgcgatcagcacgagcgacaggaaaaacatggcaaacgccgtgccctgataccacgcattgcggtactccgtcatcccctgcagcttgtcctcactgatcccgtgcatccggtacacttccgtgcggatgcgctcctcgaactgctcgttgtaccgctgctcttccttggtattgcgcagatgattctccaccgacaggctcatccggtcaatatattcctgctcctgccggatccgtctgctgcgcagcttctcgatctcactctgtctctggacctcttcctcaaggcgcatgaccttgccgatgcgcggattcttcactgtgatatccgagtaatccggctccatatccgcgatccggacccgcgcgccggtctgccagacctccgcctcattttccgatctctccgccggctctatgctcgccgataacgtctctttcgccgatgtgctccctgcctcctgctctgccggtgtgcttcccgctgccgtcttttccgcttctgcgcttcccgccatcgtccgcgccttttcccctgcttttttccttctgcggctcatttgtactccccttttcttcattcgtactcttttttctcatcttagcacagaatccgttggattacaaacgggggattatcattcgattactgcacctcaaggtaggagtagcccatcaagctctcatcgacctcgcgcgcgacctcgcgtccctcgcgaatcgcccagacgacaagggactgtcctctgtgcacatcgcccgccgcgaacacatttttcacgctggtctcataggcgccctccgccgttgcgacgttggttctgccgtttaagtccacaccgaacgcgtccgccacatatttttccgtgccgaggaatccggcagcgatcagcacaagatccgcttccatcttctgctcgcttcccgcaacctcggtcatcgtcacacgcccggtcttctcatcccgcttcggttcgagctttacagtgacaagcccgcagagattgccgttcttgtcttttaagaattccttcaccgtcgtctgatagatccgcgggtcgtgcccgaacaccgcaatcgcttcctcctggccgtaatcggtctttaacaccttcggccactccggccacggattattctccgcgcgctttgccggtgcctgcggcatcatctcaagctgtgtcacgctcgcgcagccgtggcggatggacgtgcccacgcagtcatttccggtatcgccgccgccgataatgaccacttttttcccttttgcggagatatagctgccgtcttttagctcagaatccaggagactcttcgtcgttgcttttaaaaaatccacggcaaaatagattcccttggcgtcccgccccggtgccttgatgtctctcggattcttggctccgcacgctaaaatcacacggtcgtactcctttaacagcttggaggcctttacatcctttccgacattggtgccggtcacaaaggtgatgccctcctccttcatgacggcaaccttgcggtcgatgacccatttttccagcttcatattcggaattccgtacatcagaagtccgccgactctgtcgtcccgctcatagaccgtcacagaatgcccgcgcttgttgagctgatccgccgccgcaagccccgcaggaccggagccgatcaccgcgatcttcttgccggtgcgcactttcggaggctttgccgccgcataaccctgctcatacgcattctcgatgatgccgtgctcgttcgccttgcaggttaccggatcttcccagtgcccgcaggtgcaggcagcctcgcagagtgccggacatacccgggaggtaaactccgggaaattattggtcttcttcaggcggttgtatgcctgctcccagttccccgtgtatacaagatcattccactccggaaccaggttgtgcagcgggcatcccgaggtcatccccatgatgttcattcccgcctggcagaacggcacgccgcagttcatgcagcgcgcgccctgaatctgttgtctctctttggacagaggaatgtggaactcattaaaatttttgatccgctccttcggctcaatggcgcgggcatcttctctgtcatattccataaatcctgttggttttcccataattctatcctttctcgaaaatgcatgagtcacacatgtcaaacgacacctgctcacacactatccacgcgtatttgcataaaaagcttcaatctgtgcctgttcggaagaaagacctttctcctccatctgaacaatcgccataagcatacggttatagtcatacggtatgactttcttgaacttcggcagatactcgctgaaattatccaggatcttcttgcccttttccgagttggtcagcgccacatgttccttgatcatgtcctttaattccatgacatcatatttgttggaaatctcctggctgaataccatttccttattcattcttgtgtagaggtcattgtcctcgtcgagcacataagcgataccgccgctcatgccggctgcaaagttcttgcccgtcttgccgagcacgacgacacggccacccgtcatatactcacatccgtggtctccgacgccctccacaactgcggaagctcccgagttgcgcacgcagaaacgctcgcctgcgacgccgctgataaacgcttttccgctggttgctccgtagagcgccacattaccgatgatgatattctcatccttctcatacttcacgcccgccggtgcatagacgacaagcttgccgccggataatccttttccaaagtaatcgttggaatcgccgaccagctctaacgtcagtcccttcgggataaaagctccaaaactctgtccgccggcaccgttgcattttacaatgaaggtatcctccggcagtccctctccgccgtacttcttcgtgatctccgaaccgaaaatcgtaccgaaggaacggtcggtgttcgtcacctccacatcaatacttctgcgctgcttctgctctaacgcaccctttaactgttttaagagcacggtcacatccttggacttctccagttcaaaatcatagacatgcttcgggtcaaaggttactttctccttcggtcccgcaaacgggttgttcaaaagattggagagatcgatctcgcggtcgcgtcccgaaagatcctcgcgcaccttaagcagatcgcttctgccgaccatctcgtcgatcgtgcggcatccgagctttgccatatactcccgcagatcctgtgcgataaagcgcataaaattctccacatattccggcttgccggcaaaacgcttccgaagctccgggttctgtgtcgcaatacctgccggacaggtatccaggttacagacgcgcatcatcacgcagcctaaggtcacaagcggcgctgtggcaaatccgaactcctccgctccgagcagcgctgccgtagcgacatcgcggccgctcatcagcttgccgtccgtctcaatgcgtactttgttgcgcagtccgttcataatcaatgtctgatgtgtctccgcaagaccaagctcccacggaagtcccgcattgtggatcgagctggacggagccgcaccggtaccgccgtcatagccggagatcaggacaacctgtgcgcctgcctttgcaacgccggctgcgaccgtaccgactcccgcctcagataccagtttcacggtgatgcgcgcatcacggttcgcattctttaagtcgaagatcaactgctccagatcctcgatcgagtagatgtcatgatgcggcggcggggagatcaatgatacacccggtgtggaaagtctggtctttgcaatccacggatagaccttcttgcccggcaggtgtccgccctcgcccggctttgcgccctgtgccatcttgatctgaatctcctgcgcgctcaccagatactcactggtcacaccgaaacgtccgctcgccacctgcttgatcgcagagcaacggttgaccgggctgctcttgctcgcaagacggtctgcatcctctcctccttcgccggagttggacttgccgtgcagacggttcatggcgatcgccaacgtctcatgcgcctccttggagatggaaccgtaggacattgcccccgtcttaaaacgcgtcacgatggaatcgacactctcgacctcctcgagcggcacgccctttttcgggtaattgaaatccatcagaccgcggagcgtgatctctctctcttctttattcacaagctctgtgtactgtttaaagagttcgtagtcgccgcgctttgtcgcctcctgaagcagatgaatcgtcgccggattgtagagatgcggatctgcgccgcttctcatcttgtggcgtcctctgctgtccaatgtgagatccgtctctaatcccagcggatcgtacgccgccgagtgaagctcattgacgtcatccgcaatatcctccagcgtaatgccgccgatcgggctgaccgtattcgtgaaatacttgtcaatcacatccttattgataccgatcgcctcgaagatcttggaaccctcgtaggactggatcgtcgagattcccatcttggatgcgatcttgacgatgccgtttaaaatcgctgcattgtaatcctgaaccgccgcataataatctttgtccagcatatgctcgtccaccagctgttttacggtatcctgtgccagatacgggttgatcgcacaggctccgtagccgaggagcgtcgcaaaatggtgtacctcacgaggctctccggactctaagatcatggcaaccgccgttctctttttcgtctttaccagatgctgctgcagtgctgatacagcgagcagtgacgggatcggcacatggttctcgtcgatgccgcggtcggagaggatcagaatgttcgctccctcacggtacgcacgatccgcctccacaaacagacgctcgatcgccttctccaagcttgtattcttatagtagataatcggcagtacttctaccttgaatccgtcgaccttcatcgccttgatcttcatcaggtcggtgttggtcagaatcgggttgttgaccttcaataccttacagttctccgcccgctcctccaagaggttgccgtcctcgccgatgtagacggtcgtagaggtcacgactttctcacggatcgagtcgatcggcgggttggtcacctgcgcaaacagctgtttgaagtaattaaacagcggctgatggtcactcgcaagcgctgcaagcggtgtgtcaatacccatggcggatgtaccctcgccaccgtttttcgccatcggcaggatcgcctcgcgcagagattcgtaggtataaccgaatgccttctgcatgcgctggcgctcttccttggtatactccggcacacgctcattcgggatctttaaatcctcgagttttaagaggttgcggtcaagccactcaccatatggctgcttgttcgcgtaagtctccttgagttcgtcgtcatcgatgactcttcccttgacggtatccacgagcagcatcttgcccggacgcagacgctcctttaccacaatcttcgtcgggtcgatgtccagcacgccgacctcggaggagaggatcagataatcatcatccgtaatatagtaacgggaaggacgcagaccattgcggtcaagcacggctcccatcatatcgccatcggaaaagaggatggatgccggtccgtcccacggctccatcatcgtcgcgtaatactggtaaaaatcctttttcttctgcgacatgatattgttgtttgcccacggctctgggatcatgatcatgactgcgagcggaagctccataccactcatcacgaggaactccagcgtattgtccagcatcgcggaatccgatccctcactgttgatgaccggaagcactttctgaagttcgccttttaagtgctcggactccatcgtctcctcacgggcgagcatcttatcggcgttgcccttgatcgtattgatctcaccgttatgtacgataaaacggttcgggtgcgctctctcccagctcggattcgtgttcgtggagaaacgggaatgcacggttgcaatcgccgactcgtaatccttatcctgtaaatccgcaaaaaacagacgaagctgctccacaagaaacattcccttatagacgatcgtacggctggaaagggataccacataggtatcgtcgttggactgctcgaagactcttcgcgccacatacagcttgcgatcaaacgccagtcccttctccacatccgccggacgcttcacaaaaccctgcatgatatacggcatgcagtccaccgctttctgtcccagcttcgtcggatcggtcggaacttcacgccagccgaggaactccattccctccttgccgacaatgacctcgaacatcttcttggcacggttgcgctttaactcgtcctgcgggaaaaagaacatgccgacaccatagtctctctcctcaccgagttcgattccaagctgttttgccgccttggaaaaaaacttgtgggatatctgcagcagaataccgacaccgtcaccggtctttccctccgcatccttgcctgctctgtgctttaagttctcaacgatctttaacgcattctccacagtctcgtgtgtcttgattcccttaatgttgacaaccgaaccgataccacagttatcgtgctcgtaacccggatcgtacattccggctgcctgttttcccgcatccgataccgagaaacggttgagggcgtccttcttataagtggtctgctctttcataatcagcttcctttctgcattctgtattccgatcagctgtctttactgcacggacagttgtctttaccgaatttgttatatcctaatatacaactttctcatttgtttgtctaccagtttattcttataattgtctgattatttgtatatttattattgctaaatctattgtcagattttattagttattatctgtgcaaataatacttatacaaacaattccatgtataagagcccgaaaaaaattttgcacgcaaaactttttccgggctctatttctgccttttcttaaattgtatctgaattgtcacaccggtctatgcggtagctgtattctccagatctcccaccagatactccatgatgtcgcacagcgtcacgattccggtaaccccgccgtaggcgtctgtcacgaccgcaaaataattctgctgctgtttcatctgctcaaaaatccggtttgccttcatggaatccgctgccagcatcggtttttgcaccgcgcactgcatcactttgtcacgcgtgtggtctttcatgcggaaatacgcttttccatcgaggattcccacgacatcctcgcttctccccgcaaagatcggataataggtatgtacgctctccgccagaatccggtcccagacggcttcatcctcctccgtggacagagataccatctccctgcggtgcgtacagatcgttccgaccgcaatatcgtcaaacccgaacacgttctgtatcatctctgtctcctcggtcggaatggttccctgctctcttccctcggcgagcagcagccggatttcctcctccgacaccgtctcctcttcctcctccgggtcaatgccaaaccgtcttaaccagaaattggtcgatgcggtaagaagccacaccagcggtgcaaagatcttcgccaccagggagagcattcctgccattttaagcgccagctcctccgcctttttcatcgccacccgcttcggcacaagttccccgaagaccagattaaaatacgctaaaatcaatgtaatcaccacgatgcatgcggattttaacgcctcctctgcaaccggtattccggtgcccctcaaaagcgtcaccaacggctgtgcaaagttttccgcggcaaacgcactctgtaaaaatccggcgagtgtgatcgccacctggatcgtggcaaggaattttgccggctgctttatgagcgcctccagctttccggcgcgcctgtctcccgcctcgcagagctgtcggagttttaaatcactcatcgagattaccgcaatctccgcgcttgcaaatacggcattcaaaaaaatcaaaaccatcaataagaatatgggctgcaacatgtctgctcctttctgtttccggcgtcctgtgatacgccctcctgctgcctgttacgtgttgtgtcatttacgcacaaaaaggtatgaccttccggtgtccaaaaaagacctccggtaagccatacctttacctattcataacactgcatggagcagccgtattctctttttaaaagcctgcatatctgtgtatcgctgtcactgtccgcactatcgtccatgaaactgtcactctccttcctgcgatgctaaatggaccggggatcccgccattcacgtcatttaacataccacaggaaactatgacagtcaataactgcacctctacagatactgctaaggttttaggcagcggacgttttctcctcttcctgccgcactccgccctttttcaccagcagaaccgcaaacgctgccaccgcaaacagcagcaccgtcactgcaacacctgccgccgtgggctggtaggcaatgtccagccagccggtctcgctgcgcacaaccgccatcacattcgccccgatatgcgccagaacgggcgcatacaaaaagccggttctctccagcagccatgcgagcagcagacctaaaatgcccgcatacaaaaactgtaccacgttccagtgcatcacgccgaaaataaccgccgagagcacgattgccggcgcactgccgcacagcagggatagtcttctctccacgacaccacggtacaaaagctcctccgccagcggaatcacgaggcaggagccgagcagttcaaacacaaccccgccggcaaaaaacgcctgattcgcgctttgaaagcccgcggacgcctcaatgagcggcgtcatggcaatcacgttgttgaccgccatgccaagagatgctcctgcaagcagtgagcctgccacagtgcagaaaaaccttgcgtccggtctgatgccgcgcctgccatagacagtctcccgcgcagcgcgatcctgcccataatgcatccagacgaacggaatcgtggcagccgcgcagagcatctgccgcagcatgtaggattcctcccccgcgccgagcagcagcgtcagaaaaaagtaggcaagcgatgacaccacataatagataccgatcggatatatgattctccagattttataagcacctgtcgttttcactctgcctctccctctcccgctgcgtcattctcaatgtatgtctccacctcttcgatgcggtcgaagaccgcctccgcacctgcggcgaacagttcttccctggtaccgaagccatagctgacaccgatacagcggattccgaacgcctttgctccggcagcgtcatacttcgtgtccccgatcaggcacagttcgtttttcccgatatggctgcccgccatgcggcgccccagttcctcgagcacttccgctttcgtactgatcgagccgtccagcgtggaacctaccacctcatcaaaatatcccagcagatcaaagtgctctaatattcttctgcacgccgtctctggctttgaagacgcaagcgcgagcagataaccatgctccttgaaacgcgcgatcgcttccctgacgccgtcgtagaggctgcactcgaagattcccttcacgtcaaacctctctctgtacttttccacagactgccacgcttccgcttccgtcatgccatacttttcgcgaaataccggatctaagggcggtccgataaagcagcgcagctttgtgcagtccggctcatcgatcccgtaagcgcgcagtgcgtattgcacacactttgtgatcccctcctcggaattgatgatcgttccgtccagatcaaataatacagcttttatcatcgttatttcttcgttcctttcgtgtcgcggcccgccacatgcagccggtttaacatcacaggctttccttttacctccgtctgggcgctctcaccatcgtcaagcagatgaatcgcggtaagcgcatctccgtccgcaagccgcatgccgcggacgccgaccgcaccctttttcttctccggaatggtatccaccgcaatccgaaggaagaaatcgcgctcggactgcatgacgatcgtctcattcccggcaaccggatgcacgaaaagcacctcatccccgtcggtaagcttcgtcgccgcggtcgtgcgctttgcaacgtcaaactcgcttccgtccacaatcttaagcatcgccgtcttcgtgccgaagatcagcctgtggttgcagatcgctcccaggttcgtgatatagacaaaattctcctcgctgctgttataattgctcagattgtcaatcggcgttcccttgtcgcggaacttgccgaacggcagatccagcaccttgagcagatgcatctgtcccttgttcgtaaaaatgcagatcttatcggtattcttacaggtcagcacatagcggttctccgcatcggccgcctcgcggttgcgttcatacgccgccacgtcgatcgtcttcgcatagccaaagcgatccatcaggaataccacgtccatctcctcaatcttcttctcctcgacaatcgcctctttgagattgtcaatgacagtgcgccgcggtctgccatactcctttttgtaagcttccagctcgcggataatcacctttgccatcgccgcacggttgcttaagatctcattgtactccgcaatattggcaagcgtcttctcgtgctctttcatcagagcctcgatctcgagtccgatcagcttgtacagacgcatctctaagatggcatccgcctgacgctccgtaaaacgcaggctctgcgcgtccttttgggactgcgccgacttaaaggcaatcccatcggtgattccctcggtcagacaggctctcgccatcttgacgttcgcactgccgcgcaggatctcgatgataagatcgatcacatcgcaggcgtggatcaatccctcctgcacttccttcttctccagctccctggcgagcagcgtcgtatactttctctttgccagctcatactggaaattcacatgatgacgtatgatcggcacaattcccatcgtctccggtcttccgtctaccaccgcaagcatattgacaccgaacgtgtcctcaagcttggtcttcttgtataataaattctccagattggcagcgtccgctcccttgcgcagctcgatgacaatgcggatgccctccttggaggactggttcgtgatatccacaatgtcattcgtcttcttcgtctccacgaggctgtagacatcgtttaagaactttccgatatttgcaccgatcatcgtatacggaatctcggtaattaccaggcgttcctttccgcctttgacctgctcgacctccacttttccacggatcttgattttccctatgcccgtagagtagatggctgtcagctcgtccttgttggcgatcacaccgccggtcggaaaatccggtcccgggatatactgcatcatctgctcggtgttgatgtccggattcttcatataggcaatcacaccgtcaatgacctcgccgaaattgtgcgtcggaatgctcgtcgtcatgccaaccgcaattccctccgcgccgttgatcagaagattcggcacctttaccggcagaacctccggctctttctccgtctcgtcaaagttcggcacaaaatccacgacatccttatcaaggtctgctaagaacgcctcctgcgtcagcttctgaagtctcgcctccgtgtaacgcatggcagccgctccgtctccctcgatggagccgaagttgccgtgtccgtccaccagcgtctgtcccattttaaaatcctgcgccagcaccaccaacgcgccgtagatcgaactgtctccgtgcgggtgatacttacccatggtatccccgacaatacgcgcactcttacggtacggcttgtcatagcggatgccgagttcatacatatcataaagtgtccgcctctgtaccggctttaacccgtccctgatatccggcagtgcacgtgagataatcacgctcatcgcatagtcgatataggatttctgcatcagctccgaatactcggtgcggataatctgttcttcctgtttcatggtaatcctcatttcctgccgcttcttcctgcggctctctcatcccgcgcgtgatcctgccgcacggtatcgcgtctgtcatgcgtccacggttgcatccgtcgcatgttcatagataaaggtcttgcgcggcggcacgtcattgcccatcagaagttccgtgatgtcggacgccatgcggccgtcctcaatctcaatccgctttaacagccgtctcttcggatcgagcgtcgtctcccagagctgctccgcgtccatctcgccgagacctttataccgctgcagcgtaaaactgcccttgtggctccgtctatagcgctccagcgcctcatcgtcgtagaggtactcttcctcgccgcggcttggaatcgccttgtaaagcggcggcattgccacatagacatgtccctcatagattaactccggcatgaaccggtagaataacgtcaaaagcagcgtggaaatatgcgctccgtcgacgtcggcatccgccatgatgataatcttgtcatagcggagcttcgtaatatcgaaatcattgccgtagccctcggaaaatccgcagccgaacgcattgatcatcgtcttaatctccgcgttggctaaaatcttatcgatgctcgccttctccacgtttaagatcttaccgcggatcggcagaatcgcctgaaagctgcggtctctcgctgtcttcgcggaacctcccgcagaatctccctcgacgataaaaatctcgcagatcgacgcgtccctgctctcgcagttcgcaagcttgccgttggagtcaaaggagaacttctgctttgtcagaagattcgtcttcgctttctcttcggtcttgcggatcttcgccgccttttccgcacaggaaatgacggtcttaagcacttccagattcttgtcaaaataaagctggatctcgtcgccggtcaccttcgccgtcgcacgcgacgcgtcctggttatccagcttcgtcttcgtctgtccctcaaaacgcgggtccggatgcttgatggagacgactgccgtcatgccgttgcgcacgtccgcaccggtaaaattggcgtccttatcctttaagatgccaagctctctcgcataggcattgatgacggtcgtaaacaccgtcttaaaaccggtgatgtgcgttccaccctccgcattgaaaatattattacagaagcccagaatattctcatgaaattcgttcgtgtactggaacgccgcctcgacggtaatgccctcagtctcccccttaaaatacacgacatcatgcagaacttccgtgctcttgttgagatccttcacaaaccccttgatgccttccggctcgtggtagacgatatgctcggtctcctcccctctccggtcctcatagatgatcgtaagctccgggtttaaatatgccgtctcatgcatacggctcttgacctcgtcctccttgaaacgcgtcttctcgaaaatctccgggtccggcaggaaattgaccttcgttccggtcttcttcgtcttgccgatcttcgggagcagtccgttctcaagctccaccaccggcacaccgcgctcatagcggtcgtgatgaatgtagccgtctctgctgatctcgacgtccatataggtggacagtgcattcacgaccgaggaacccactccgtgcagtccgccgctggtcttgtatgcggaatcgtcaaacttgccgcccgcatgcagcgtcgtgtacacaattcgcgctgccgacacgcccttcgcgtgcatgccgaccggcacgcctcgtccgttatcttccactgtacaggagccgtccgcctccaatgtgacatatatggtatcgcaggcacccgccagatgctcgtccactgcgttgtccacaatctcgtaaataagatgattcagaccctttctggacacgcttccgatgtacattccgggtctcttccttacggcttcgagtccttccagaacggaaatactactctcgtcataagtctctttctttgccatgttcttcttcctttccttgacattcctctggataatataacatactgggaaaacccgtgcaagcaacagaacgtatgttttgtaaaaattttctatttttgtgcaaacagacgaaatacgcggaaaagaatccgattgctttctttgtccgcgtattatcatttgcttttctgttgtatcttacatgttcatcagctcggctgccttatccttcagatcagaggaaatctccttcaccgaatctgtggatgcggcgatctcctcggtgcttgccgccagattggtcatccgctcatccacttcccggataatctctgtcagatgatccgactcctccaacagctttccgatcgcctgactgatctcattcttgttatcgttgctgtcgtttgcggttgctctgctgttctccgagagattcttgatctcctccgccaccaccgcaaatcctctgcctgccgcaccggcacgggcagcctcgatggaagcgttcagtgagagcagattggtctggttggcaatcttcgtgatgtcgttgttgttgttctcaagcttatccaaaagctccgtgatcgcctcaaacgactgccgcatctcctggcagaatccggtcacgccggtcatcgcatccgtaatcgccgtgctctcgctcgcattgctgctattcccggcagccatctgcccgatggcggaatccagttcctgaaaatcggaattcagtccctcgataattcctgcaatcagatcgcttctgcgctggatctccacattcgcctgctggctttcctccgcagccgcctgtgccgcacgccctctttcctccgcctcgttcttgataaaatgaatacaggaattctcactgttgcacccgttgtagatcgctgtcgccatatcccggcaggtcttataaccgcaggcgctgcagtcgatcgcacgatccatcgccgtctgcttgttcagacggctgtatactgcttctaactcctgtccctccggcacgcggatctcattccccttcgaccggtcggtataccggcgcgtaaaatccgccggttcaagctgcgcaaactgacggttcagctgtgccagccgctgcttcggcgtcgccgatctcgcccacggtcccttgaccttcttgctcttctcccggatcttatgcagctcgtagagcacatcatccccggcagtcttctccggctcaacgcccgtaccgtagatgcatcccatcgcacagttcagcgcatcgaccataaacggcagttccttgtgctctgcgacacgcttgcgataggcatccaggaattcatagacatggcgctctccctcaatctgccggataaatacatcctctccgcagaaccagtagacattctccttcagtcctcccggcatcggatagatcgagccgagaccgtattcgatctcatcgctgacccccggtccactgatccggtgcttcctgcagtaatccatcagatgatcgaatgtcacattataagaaacatagccgtctgtatccggatcggaaatctcgttcttcttcgcaatgcacggactgatgaacgcaagcttgtccgtgatatgtaaatacttcttcgcgtagattgccgcacacatcatcgggctgtgtaccggcatcagcttcggaagcagttccggtgcatacatctcgatgtagttgaccaccgcaggacacggctgcgagatcccgcccgtaaactgattcttcgtaatataattgatatacgcccaggtcgtaatgtcggcgccaaagctgacactgatgatccgctttgcccccatctgtcttaagccgcctaaaatctgctcatactctctgggataattcgcaagaaatgccggcgccagaagcagtgaaatggattcgcctctctgcagatccgcaaaaaactgctccgtatcatcggcatattccctcgcctgatgttcgcaggcatcaaagcatgcaccacagttgatgcactgtgcatggttgacctcaatgcgcggcttcccgtccaccacgacagcctgattcgctgtcagaacgggacagaccgaaatgcaccggttgcacccaatacagttctcattcgtgtaaacatagccagccataactcttccactcccttatgctgtcttttgtttaattttaacatatagcatatattttttcaactaatttagtgcattttcactattcttgacatactgcatgtgggaaatgaccatcattgcaatcttgaatgtcatcgcatcatcaaatttgcggatatcaagcccgatcaccttctccaggcgctccagacggtacaccaacgtgttcctgtgcacgtaaagctgtcttgccgtttcagagatattcagattgttctcaaagaatttctggatcgttgtcgtcgtctcctcgttgaacacatccggaatttcatccccaaatacctcatgaataaacatctcgcacagagacatcgggagctgatagatcagtctgccaatacccagataacggtatgcgatcgtctctttttccgcgtagaagatttttcccacctcaagcgccatctttgcctcctggtaggatttcgcaatatcctgcaggttgttcacacggttgccgtagccgacccggacgcgtaccatcgcctccgcatgcatattgtccacgatcattgacgccagggacaccagatcctcgtcctctcccatctctctggtgtctttgatgagcacaatgctctgctcgtccacctcagtcacaaaatccctggtcttcgccgcgaacagattcttgaccagttcgatcgctgtggcgtccttcttcccttccagctcgatcacaaataccacgcgctccgcctgttcgatgtgaagcttctgcgccttgttgtacatatctaccacaagcatattgccgagcaggatattctgcatgaagttgttccggtcaaactgctccatgtaagcagacacaagcgtccggatctggcagaccgccagtcttccgaccatgtacgcgtcctccgcagaagatttggtcaaaaggacatattccagttccccgtccacatacaccttaaagaaatgacatccggacagcatctggctctccgccatggaacccgcaaaagaattcacagcgtactccatatccccttccgtttcaaacgtcgctgccacctgctttcccttatccgtatatagtgccagatcaatcttggaaatctcttttatctcatctaatgctgcctgtatcttgtgattcgaaatcatgtgtctcgcctttcctgtcaaatattactgtacattgacatgcctcatgtgttccatacgttaataaaaactgggtacaacatgtgcacccagttttacttttaagtcctattcaattctaacggattagttggtaattgtcaattctgtttctttgtcgaatacgtgaatcttctccggatcaattgccatcttgatgtggtcgcccatacgtgcagttgttctggaatcaacctttgcagtcatgcttgcgcctgcaactttgaagtataacagtacctcagaacctaataactcatatcctgttacatctgtctcgaatgcagcatccttatgagcctcgatctcgatctcggaatcaccgatatcttccggtctgatacccataacaacagtcttgccgttgtatccgccgtcagctaacttcttagcttttgcaggaggaagaacaactgttgtgttctcgaaggaaaggcttactttctcaccctcaaccttgcatacagcatctacgaagttcatctgcggagatccgatgaatcctgctacgaataagttattcggctcgttgtataacttctgcggggaatctacctgcatgataacgccgtcctttaatacgacgattctggtaccaagtgtcatagcctcggtctgatcatgtgttacgtagatgatggttgcttttaatctgttatgtaaggaagcgatctcggaacgcatctgtacacgaagctttgcatccaggttggagagcggctcatccatcaggaataccttcgggttacgtacgatggcacgtcccatggcaacacgctgtctctgtccaccggagagagccttcggcttacggtctaataacttctcaaggtcaaggatctttgcagcctcctcaacttttctcttgatctcatccttcggaacttttcttaacttaagaccgaatgccatgttgtcgaatacggtcatatgcggatacagagcgtagttctggaataccattgcgatatcacgatccttcggctctacgtcgttcatgagctttccgtcgatgtagaactcaccggaggagatctcctcaagacctgcgatcatacgaagtgtagtagacttaccacatccggaaggtcctacgaagataatgaactcctgatcctctacttcaaggttgaaatccttaacagcctcaaagccgttcggatatactttgcaaacgtttttcaatgataaacttgccattggtacgatacctcctaaaatttgttcgtttttaactactcttactatacaaaaaaaacagccaaaataccatagaccgcctacacaaagaatttttgcttttcttgtagaatgtcacagtgttttggttgttttttctattctttcgtcaaaccgacaggttttccatcaaaaagtaagcactttgacgaacgcattactgttttccagtgcttccgaatccgccgcggtttttgttgccgaggctctccacctcgtcaaacgtgatcttcggctgattttcaaaaatgcggaactggcagatgcggtcattgacgtgaatcaccgtgtcgcgcaccgcatagaccggcatccgccacatatcgtcatccccgcagtaggtgccatcgataatgccgcagctgttcgtctggatgattccgtaatttttgaaagtggagcttctcggtaccacatgcgcctcatagccctccggaagctccatggcaacgccgagtggaatcagacagaactcccccgctttcagtgtcacttcctcagacgcccgaagatcgatccagtccgactttccgtcaatataggtcagacgttcaatcgcatccgtaaaatatttaatcctgatctgtggcatgtatgttcctcctgttatgtcgatttctttatgtttcccactccggggcgccatgtcgcatttctatgcttcccactccagggcactatgctctgcacgccggtcgcgcatcatcagttcccgcactgcttcttttgccggcttatcctcaaaaagcacacagttgacttcctcgatgatcggcatatcgaccccgtatttttttgcaagcgcgatcgccgccttggcggaatacacgccctcgaccaccatcttgacctcatccatcgcctgcttcatggtatagccctgcccgatcagcattccggctttgcggtttctgctgtgtctgctctcacatgtcacgatcagatctccgattccggtcagaccgctcagtgtctccgcctttgcccccatcttgatggcaagacgcgacatttccgtgattccgcgcgtgattaacgctgctttggtgttgtccccgtagccgagtccgtccgccatgccggctgccagtgcaatgacgttcttcagggaacctcccagttccatgccgagcacatccgggcttgtgtacacgcgaaacacctcattcatgaaaatatcctgcacgccctctgccaccttgcgcttctttgctccggcaacaacggtcgtcggcagtccgacgccaacctcctcggcgtggctcggtccgcacatcacggcaacctccgccgcaggtacttcctcttctacaatatcggagagcgtcatcagcgtattttcttcaatgccctttgccacacagacaatgatctgtcccgccttcacaaaaggcgccatgctttttgccgtgcttctggtgaagacagacggtaccgccagaatcagatattccttatcttccactgccgccttaagatccgtggtaaattccatatcctccggaagcttcacccccggaagcttatccacatgctcatgccgttcgcgcagcatcgcgatctccgcttccacaatcgaccacaccgtcacctggttgccgttggtgtgcaacaccttcgcgagcgctgtcccccagcttcccgctccgattaccgctacttttgccatatcttttattttccctcctgtttgttcttcttgaacgtgaacttattctccgtgccgtgcagcagacgtccgatgttgcttctgtgacgccacagcgccatcgccgtaaagcaggcgctcaccacatagaactccggaaggtacgcggcatcgatatgcagatatcccatatgtccgaagatcagtacctgcaccagatagctcgtcaccaccagaattgatccgagcgacacatatcttgtgatcgcaatggaaccgatgaataagatcagacagaccggcgccgccagcggacacacggcaagaatcatgcccgatgtgcaggcaattccctttccgcccttgaacttgaggtaaaacggaaaattatgtccgagcacagctccgaaaccggcatacagttccagaatcttaaccgcatccggataagcgttccggaacagaaccttcaccagaagaaccgccagaatcgccttgcacagatctcccgcaaatgtgatcagtccagccttgattccaagcacacgcagggaatttgtcgtccccgcgttgccacttccctcactgcggatatcaatcccctggctttttccgtagagataccccgtctgaaacagtccaaacagatacccgattcccaatgcaataacccttgctcctatcatcactgctcttcctttctctcccgaataatgaatttcagtgccgttccgcggaaaccgaacgtctcacggatacggttctccagatacctggtgtaggaaaaatgcatcaattccttatcgttgacgaaaatcacgaaggtcggcggctttaccgcaacctgtgtcgtatagtagatgcgcagacgttttcccttgtctgacggcggctgctgcatggcaactgcctctgtcacgatctcgtttaagacaccggttgccacacgcatgctgttgttcgcaatgaccacatcgatcagctcaaaaatcttatttaagcgctgtcccgattttgcggagataaaaataatctcggcatatggcataaagcttaaaatctgacggatcttctccgtgtgacggtagatcgtcttgtcatccttctcgatcgcatcccacttgttgaccgcgatgataatcccttttccgcgctcgtgtgcgattccggcaatcttggcatcctgctccgtgacgccctccgtcgcatcgatcacgatgatgcagacatccgcccgttccaccgctgtcaccgcacggatgatactgtagcgctcaatctcttccttaatcttattcttccgtctaagacctgcagtatcaataaagacatattcttttccgtcgtaggtaatgtcggtatcaatcgcatcgcgtgttgttcccgcaatgtcggagacaatcacacggtcctcctgtgccagcttgttaatgagggaggacttgccgacattcggcttaccgatgatcgcaaccttcgggcgctcgtcctcctcctcgtccttcgcatagtccgggaagtgtttgaccacttcatccagcatatctccaagtcccagcatggatgccgccgagatcgggaacggatcgccgatgccgagattgtagaactcatacacatccggcatgaacttctcaaagctgtccactttgttgaccacaagcacgaccggcttgccggagcgtctgagcatatctgccaccttggaatccgaatcctgcagtccctgtctgacatccgtgaggaaaataatcacgtccgccgtcgcaatggcaatctccgcctgctctctcatctgcgagagaatgacatctctgctgtccggctcaataccgccggtatcgatcatcgtaaaatgataatccagccagttgacgtccgcatagatacggtctcttgtcactcccggcgtatcctttacaattgaaattcgctctcctgcaagtgcgttgaacagtgtggattttccaacattcggacgccctacaaccgctactacgggtttactcatctatctgacctttcctttctataaaaaacagtatcatccatcttcttactgacaggcagacttcacctgtccctatcataatcctgaccgcttgattttacaatatctgtcccgacttgtaaagcagtttaacaaaggcaggcaagaggaactgccgcaataagcatagacctctttgtgggatacgtaatattattagaaaaccagcccttgggatttcagatgaaaatgcaaatggaaattcggttcaacaaatgtggcatttctaaccaaccgaatgtttgcatcttcgatgatccgtgtctttccaagtttggagcactccgcgggtcatgtccgcatcccggagacaannnnnnnnnnttgtgtgtcccttatggcacctctgaacaaaacataaccgcgcgaagccgctgtctgagtcggcatctgccctattttcaatagcagatgccggcgagttcggttcgcgcggttttatattgtctgtgaagaggtgccattagggacaccagaaagtccgcccattgtctccggtgtgccggacatgcacccgtcggattgtccaaacgtggaagagacacggaatccgatgcaaacattcagccggaagaaatgctcacatttttctcaaacgaatttccacctgcatttccacatgaaatccccaagtatgtttctaaaccatattacttatcaacacaaagcacaatatgcttcgtgcggcagttcctcttcctgccgtatctctactgcatcatctcttggttcgtcatcagcttccactcgtcatttgtgatgccaagtttctcaagcgtctctacgatatgcacgcagtctggtccgaacgtcagatacagattgccgcccaccgtcgtttcctgaccgtccacggcttttccttccagctgctctaaactgttataatagtcataataatacatccagttgtcaacatacctgcctgtactataatattccagttcaatgttgctgtagtacgtgtcttccggcggttcgcaatactgataatacttcgccagatttccatcctcgatatccgcccggatggcctttaagatctgctcaatctccttctcggaaaacatgtgcgtattgttaagccccgtagaagtatacagatccatatatccagaggtaaaccggcactctgaatttccgataccaaaaatctcacgctccagattctccggctcgctctcccacgcaaggatctgctctgccggtgtactgtcagcacccccatccgcctcaggcagcggaagtgcataccgccgctccaccttggaaccatcctgcatataatacaggaacgttgtataataaaatcccgaaccggtacgttctacctcctgataggcatccttatttgcaataatctggcgctgcagctccgtcagtgtcgcaagttcttctcctttcacctgcaccggataatccagatagacgaacgccgtctccacatccgccacctccggcacatagcgctccagaccgaatgcatcgatttcaaacagggatacaaacaccactgtgatcacggcagtcgccgcccactccagcacgcgttttctgcgaaataccttgaaattcttttccagcagcatctctgccccgaagaaaaagaggaagcccatcgccacactgcaaagcaggagacacggatatttgcgcagctgcggcagatccgtgagcatggatatgaccgtgacaccgacgaccagacctccgcaaagtgctgctccccagcggaataccggcttgatgatcccgatgctgacccagtcgcccgccgtctcaatctgccgtcttttatacaactggtaagccgccacgacaagcacaactgctgccgccgcatagattccggtgagcggcatgcccgtgatcttaatgccggtaattccattcccgttctccgtgtagataagactgctgcgaagattattgttcagataataaagtggcgataaaatgcagctttttcccggattccatgcattctcaatcccgtagctgatggtttcaatcacctttgcaacaataaacatgcatcccacatacagatagttgacgatcacataatagcatggcattgcaaacgcctgccctgtgaacatcgccacgaaaaccgcaagtgagtatgcaaaaaatgtcacaccagcctgtgccaacagcgcagcgaacagatactgtatacaggtaaactggtttgccaggcatacgagcactgtgataaagaatgtgatgatctccggcacgatcagaaaaatgagtcctgacagataattcgtcacataaagttccagccggttgaccggcaacgcatgcatcatattggcgctttttgccgaatacagataggaaaacactgccagcgccgctgccactgcgaagaaaaagaccggcagaggagggatcatccggtgtactgccatctccaccagctgatacatgcggtaggttgtgtcctcgttccccgttccataatagtagtacggactggcagccttctgccacacccatacgggaatcaccacaaggagatatatctggtaaagcagccacagcggccagaaatgcgtgaagttcttcttaaatatcgtgcggttaaaacaggatgtctttgacttcataatctgcccctcccatctcgtagataaatatttcttccagtgtcagcggcagtacatccacaatcgtcggattgcaatatgacagtgccgcctctgcttcctttggatctccctttacgatcatggtatacacacgccctgtatttgccatgtgaagcacctgaaaatgttccggaagcttcggcattccgctctgacacgccacctggattttcgacacacttccctgcagatcactcagcgaacgctcgatcatgatttttccatgatgcatgataccgacatggtcacacacatcctcaagttcacgcagattgtgggacgatacaagcacggtcatctctttctctgcgacctccgacaatatgatgctccagatctgacgccgcatcaccggatcaagtccgtccaccggctcatccagaatcagaatgtccggcttacagcagatggcaagccagaatgccacctgtttctgcattcccttcgacagccgtctgatattacgctttacatcaatgttcgggaaaaattcctgcattctgtagaaaagctttccatcaaaagacggatagatcccctcataaaaacgcttcatctccatcgtgtctgcctgcatgaaataaaacagttcgtctggtatgtacgcgatttttgatttgaccgccttattctcatatacattttccccgtcgatctgcacctctccctgatccggacggtacaccccggtcaggtggcggatgagtgtggactttcctgctccgttcggtccgaccagaccgtagatggctcccttttccacgtgcatgtccacaccgtttagcgccacaaatccgtcaaatgccttttttaatccgtttacctgaatcataccttctctcctctctctgccgcatgctcgatccgtgtgatcagatcgctcctgctcaccgacaggaaacagagctcctccaccacttcatcgaactcttccagcagttcatgctgtctcgtattcaggatttccctgtgctccgccacaaacgttcccttcccggcaaccgtgtatgtatatccctcgctctccagatcgcgatacgctttctgaatcgtattgggattgatcgccagtccggacgccagttcgcggacagacggcagcttctcgtttgccgaaagagaatttgtgataatcagcttccgaaagccatccttgatctgttcataaatcggtttggaatcccggtaatttaactgaatcaaatcataacctcccatctgtaccaactgtactatttgtcttaatacagctactatagcatgaaaggttccctcatacaataaagataatcctatgaaattattaacttttatttaacttcggcatcagcccagatatgcacacaggagtttgaaggtgttcttcacgccgtccacatggcttctctcgtagccgtgcgacgcgtacacgcccgcgccgatcagtccgtggcgcacgtcatagcccgccgtcagcgccacatccgcatccgatccgtaatgcgggtagacatccaccgcaaagtcaagttcctcgcgctttgccgccgcaatcagtcctgtcacaacatcatagtgatacggtccgtggctgtccttcgcgcagatggacacctgtgtctcctcgcaggcaagaccgtctccaacgcagcccatgtcaacggaaataacctcagtcacaccctccggaatcgaagcggctccgccgtgtccgacttcctcaaagacggtgatatgctggtagatcatgcgctccggtgtgacattctcttcctttaaatatctcgcatagccaagcaggatgccgacgctaagcttatcatccaggaaacggctcttgatgtagccgctctctgtgacggtcgtgcgcggatcaaagcagacgatgtctcccgtcatgatgccgagtgcctccacgtcctctctggaatgtaccttctcgtccagcacgatctccgtctcgtcaaatgtacgcttcttgtcattgtaatcgccgttgacatggatggatgcattggcaagctgcagggttccctcgtagaccttttccccgaagcgggtatggattctgcagttctccgcctcggcattgttggcgttcattccgccgaccggtgttacccgcagtctgccgttggactttatctccgctaccatggcgccgagcgtgtcaatgtgtgcctcgagcatcacggcattctttttgtccttgccgccgagcgctaccagcacgccgccctttgtggtcagcttcggctcataaccgagcttctggtacgctttcatcacataatccgccacatctgcggtatatccgctcgggctgtcgattgccagaatcttctttgtctcctcgaccatatattccacgtatttttttgtcttcatcttttttctccttttccgctttctatttgattctatctacagaccatacctggaggacgatcttatacatccttatttcaggtacagaaatccgcccagatttccgcgctttccatgacttgcgcggtgggaaaacaacagctttggattgcagcaggtacagatgtccgtcactgccagatgctcttttcgcacgcccgcctccagaaaaatgatctcgttcgccttccagagatccagctggtattttttgtctgcgtgagccatcccgacgctgttcttctcactctctgccagaatctcctgctcatgccccggaaattcctccgcgaaaatatctgccacatctgcgctcacctcatagcagtccttgcaaatggacggaccgaccgcgcagaccacatcctctggtctggtgccgtatgcctcctgcatggcagacagagtgaccgctcccatgcgcgccgccgtgcctctccagcccgaatggctcattccgatggcgcggtgtacgggatccaccacatataacggcacacagtccgcgtagaacgtcgacaggacaagtcccggctcatccgtaatcagtccgtccacatcccggtagtcccgctctctggtcagtccttttccggcgtccgctgccgtgacgcggcgcacattgacggtatgtgtctgatccgagcagacaaactgccccacctctgccccgagtgccctcgccagacgatgataattctcacgcactgccgcctcctcatcacctctggtaaagcttaaattcatcgtagaaaaaatgtctgtgctgacgcctccgagccgtgttgtaaaacaatgctccacgatccccgtgcactccaaaaggggatattttagcagcagaagcctgctgccgtcctcattttcatgccagtcctcccgcaaaaccggttgttctgctggttttctcacaaacgctgtcaagtctcatcctcccgtcatccctgaaattcaaatgcatgtttcacaagccgtacttccccgtccgttccaagcaccgctgccacatcaaagcggcagggcgtcgtctccccgtatccgtgcgtcaggcagtaatattgcgccgttctgctgatgcggcgctgcttcgcccggtccaccgcctccagcggatcgcccgtctgcccgtctctgcggtatttcacttccacaaacaccaggtatctgccatcgcgggcgatgatgtcgatctctccctgccggcatctgaaattgtatccaatcagctcgtatccctgttccttcagatactcccccgcccgtctctcatacgctgttcccgtctgccgcctgttcatccggtatcctctctccctgcctttcgtccgatccatcaccacgttccgccgtccgggttcttcccgtgccttctgttaccatcacggcatctgtcatctgcctacagtaagccggattctttgagttttcccttcatgcggtccatatcgtccacaaagacaaggatctccgcgaccacctcatagagttccggcggaatcgtatccccgatctgaagtctggataaggtctccgccagcttgttatcctgataaaacggaacatcattttcttttgccgtctcaatgatgcgctccgccacctcgccttttccgactgcgaggatcttcggcgccacctcgcccggattgtaggcaacggcgaccgccgtcttttcttttcctgcaatatgcttgttctccgccatcgccacatcctcccttcaaagaatcctgctttcctatgctcttacatcaaaagaatagcggtgcaggcttcccaccgtcgcctttcctttctttacgatgttctccttgaaactgatgtcttttttctcatgtgtgaccgtgatggaagactggtagcccttgctcttaagacgcttgttcagcacttccaggtgcttttccaccagatcataggaggcgtcatcctccagataaaaattggtgcgtacgctgcggttctgcatccgcactgagacgtccgtggagccgagctgctccatgtccagatgtaaaaatgccgtcagttccgcatccggatcgcgcagattcttccggtttgcatagacatagagttccccgttcgcattttgtccggacatctttaacggcagctgcacatagtgataaatctggttcatctgattcatgaactccagattgccgtgaacctgcgatgccgtctgcaagaacgtattctgcgtgcttccggtcgcccgaaccgcctcctccatctgggaaagctgctgttctaagcgctcatacagcccgctcaccttgtgctcctgctttaattcctccggctgcagcagccactgcttctcgatcacactgcggaaaatggtctgaaattcctttccggcaaaaagcttctgcattcccgcaaagccgaacccgccattctgtgcgagcgctctgccgagcttctgcaaaaactgttctgccgtcaatttttcattcaagaccggctgctcctgcgccgcttcctcctgcgccatcagttttgccacctctggaccttcttccgagagcgtatccacaaagacttcctcctgctctccgccggcaaaaatctcctcgttgccaatcagagccggaatgttccgaagcatttttcccagatgctcgatctgctccttcgacaacagttccccgactgtccccggagtctctgccgtccttccatatgtcagttccgcggtcactccgacccctgtctctgcttctgccgctgcgccctgtcccgctgtctccgcggtcgaagcggcacctgcctcctccgctactgccgatgccgctgcggttccctgttccgccgccgtgggcgcgcccgcctctgcttctgacaccgtggctgcattttcctgtcccactgcttccgccattgctccggcgcctgcctctgctgcggaagattcctgtcccgctgccgcggtcactccggcatctgccgcttcctccccgggcataaaaatatcgagcattttcccatagagggaaaatgccgtctccggcgagagcgcctcgtccgaaagcagttccatcatatgccccgctgccagatccatctctcccacgagtgcctgccggtcggacagataattttcaaactgcgccgccatctcctccgtcaccgggagtccgagcttcgtcatctgcacgatggtctgcacattggcatccggattcgcgccaaccagcttcgccatatcgagaatgctctgtctgccgatcgacatctgctcctgcatcatcgtatccaccatcacaagcgtccggtccgtcgcaggcacctgcgccgccgaaagcgcgttgagcagaatcggattgctgacatttccaagctcggtgtacgggcggatcgcaatcgtctgcccgtcattggcgcgcacctggaaaaacatgctcgagccctgctgtaaatccatttttccgtccagccgtgcggtgatggtctgtccgttgcccagcgccagcgtcacttttccgccgcgcacactgttgatcgtcccctcgaaaatacttcccgcggagagatccccgatcgtcgacaccagtttctgaacgctctgcgccccatgcaattcttccgttccgttggccacattccggctgtactgtcctaccagatccgatatctgcatgtatgttccctcttcccgtctatacctctacaaaatttccaataaagctccggcgatggatcggcgttggtccgtattttttcagcgccgcaatatgttccgccgagccgtagcccttattcgctgcgaatccgtaccctggcatgatcttgtcgtactccaccatcagccggtccctggtcacttttgccacaatgctggccgcgccgatcgagatgctcttggcatctcccttgataatcggcacctgccgtatcgcaaccccgggtatcgtcaccgcatcatttaataatatatcgggtgcatcgcccaatttgcttatagcttcccgcatcgcctcgtacgttgcctgcagaatgttgatctcatcaatgcgctccggtcccaccatgccgatgccgaccgccaccgctttttccataatcacatcgtacagttcctcccgctttgccgccgagagcttcttggaatcgttgatgtagaggatgtcgcagtccttcggcaaaatgaccgctcccgccacaacggggccggcaagcgggcctctccccacctcatcaatcccgcaaatgcgcgtatacatcccgtactcgcgctcgtacttccacagccggtcgatccttgcacgctccgcctccagctttgcaaggcgtccgttcgcctgctcgatgagcttttgtacgcccgcgcgctcatccgacctgtatttttcgataaaagaaggcagcatggtctcctctgccgccttgaattcttccctgatttctccgatctttttcgtctccatctgcttcctctcccgccgtatgttcccgctgcctgtgctagtcgggccgctccagtgtgatcctgccaagcttgccgctgcggaattcatcaatcagaagcgtcgccgccttgctgtagtcaatctcgtcgccctttgccacacagcgacggttttccgcgatcccacgcaggatctctgccggcgccgccgtctcgtcgatggcctgctcctctgttccgtagcgcgcctgaaacgctcccggatagtaggctgtcagcactttgatcaactccagggacaactcatcgatgtttaaaatctcgtccttgatggcaccgattaacgccagttttaatccgaccgtctggtcttcaaacttcggccataagattccaggtgtgtccagaagttctacattcttgttcagccggatccactgcttgccctttgtgacacccggcttgttgccggtcttggcgcacgcctttccggcgtaggaattgataaacgtggatttccccacattcgggattccaacaaccatcgcccgcaccggacggttcatgatgccgcgctttctgtcgcgctcgattttctccttgcacgcctccatgacgaccgccgtcacctgtttcatgccgtttctgtttctcgaatccaggcttaccacataatagcccttcttctgaaaatatgcactccacagctttcccgcttcctcgtccgcaagatccgacttgttcatgaggatcagccgcgctttatttttgcccagttcgtcaatgtccggattccggctgctgagcggaatccgcgcatcgacaagctcgatgaccagatcgattaacttgatatcttcctgcatctgacgctttgctttcgtcatatgccccgggtaccactgaaactgcataattactctccattctcttactgtctgttttataaaaatccaaagtccttaaacggcgccacgcggaaccatacttttccgataatatattccttcttaatgttcccgatgttggcataacggctgtcctcgctgttattgcggttgtcgccgagcacgaaatactcgtcctcacccagcgtgacctcttccgccgccagtccggcatcctccatctgtgccacatccacatcttccgcaaacagttcgccgttgacatacacttcgccgttcttaatctgaagcgtatcccccggcaccgctatgacgcgcttgatgtaataatgtgatttttcattgccgttcggcaaaaatacaatcacatcgttcggcctgggatcggtaactttgtatataaaacggttgaccaggatctcatcgccgccgtttagcgtctccgccatggactgtcccacaacacttgtccgcagtccgacaaaatataccagtgtaaacgctaccagaagcgtgatcgcgatctcaatgatccacacacacacttccttcacgaccgacatattcacttttttcttctgtctgccaaagttcagtccgcttctacgtctgcgcattcttatcctccatgtgccatgtgcccgccgcacacgattcctgctttactttaacacaaaccctgtggcttcgcaatttaattttggtgccttacaatgcgaaaaaaccggaacacactccatatggaatcctgttccatacaaaatatgtcccggcttcttagcgctgcattgtattattttacaagctcttttacctttgccttcttgccgacacggtctcttaagtagaataactttgcacgtctgactttaccctgacgaacaacctctaccttctcaacgttcggagaatgtaacggccaggtcttctctacgccgacaccgttagagatctttctgactgtgaaagtctcgcggttgcttccgccctgtctctttaaaacagttccctcgaatacctggatacgctcacggttaccctctttgatcttaccgtaaacctttaccgtatcacctacgttaaactgcggtacttctgccttgagctgctctgcttcaatgctcttaatgatttcacttgcgttcattttgtgacctcctgattcattggatgttcttaatacgtcgattcgtaacagaggaccatctatttattcacaactattccagtataacacagattgtacggattgcaagcattttcggcaaatattttcattctctctcttcacgctccatccagtagatgcgtcccttagaaaaacagagtcccagggcctcctgcagtcctttggatgcatcattgccgatctcaacctgaccgtagggtctctcaccgcgctctaatccgagattgatcatatatgtctcaagtgccatgccgatccggcgtctgcggtactccggcgagacgaagagcatcccgatgccgccctccgcgtgcattccgataaagcccgcaagctgcccgtccacaaacgcaccgaagagcgctccttttttgatccggtctgtcacatacgcctcatccgatatcgtattgtaatcgcgcaccaccgcgtctaagtgttccatcgtaagcggacggatgaccacgccgttttcagccggtttgccgtccatgcggtacagtccggtgacaggcagcttttcgtgctttgtatacacgatctggttgcaggtcatcgccgtgcgaaatcccagatatttttctgttggttccgtcatgaactcctgatgcagcaccagaagaccgctctcctccccggcgtccccgtgtagaatttcaagcatcctgcagccggctttgatgtcctccgccgtatgaaaatacgccccactgactttatcctgcagacagatatttttcccttctgcaaaaacaaggcgcgcctgcccgcgcgcaatcagctcggtcatatccacatgcagcagcttgtccccggcaagcacctttttgcaggacatcagtctcccgtagcctgcgtagagatccggccgcctctcctgtgtgcggcgctccgcctcctgtctgcgccactcggcaatttttctctgattgcccgacagcagcacctttggcacctgctttccgtgccattcctccgggcggctgtactgtggatactctaacagatcgccctcgaaggactccgtctccccggactctccgttcgccagtaccccgggcaccatccgtgagatcgcgtctatcatcaccatcgccggaagttccccgccggtcagcacataatcgccgatcgacacgtagtccgtgacggtctcctctaatacacgctcgtcgatcccctcatagtgcccgcacaggaaaataagatcttcctccttcgcgaactcctttgccatctgctggttgaacacggctccctgcggcgtcacatacaccgtgcgcaccggtctgtcccgcaactcctccggctgccggctcctgatttcctcgcaggctgccttccacgcatcgtagaccggctgcgcctgcatcagcatgccggctcccccgccgtaaggataatcatcgacttttttatgtcgatccgccgtataatcccggatgttgactgcattcacggacagcagtcccttttttgccgcacgtccaaggatgctctccgagagtccctgcgtcaccatctccggaaacagtgtcagaatatgataattcatgctgtgcctcctattttcggttgatgtcaagcagtcccggaagcagatgcacgcacatctgtccctgctctacgtccacatcgcggatgcagtccctgatcgccggaatgagcacttcctccccgtctgtcatggagatcacatagacatcgttcgcgccggtctgcatcacatccgacagcgttcccaattcctcaccctcgtccgtcgacaccttcatgccgatcagatctgcaataaagtattcgtcctttttcagctttaccgcgttctctctcgtcacataaaggctctttttgcgatatttttccacatcattgatatcatcaattcccttaaatttgagaatcaccatatttttaaagaacttgacgcctgcaatctcaagttctaatttttcttttccggtatccaaaatcacatttttgagttttttgaagcgcgctggatcgtccgttgtcggaaataccttgacctccccacgcaccccgtgtgtcgtcgtgatgacaccgacctgcaataaatcttccatgcatgtcctccgtttctgtctctgatatccgcagtagccgcaatatgaacaaaggagctgccaccccattatctggcgcgacagctcctctgacctgttactgcatgatctctacaataactttcttctcttcctttgaggcagcagccttcacaacagaacggattgccttggcaatgcgtccctgtttgccgattaccttgcccatgtcggactgcgcaacgcgcagttcaagcacgatggctttctcattctctgtctctgttacgacgacctgatccggataatcgacgagtgatttcgcaattacttctactaattctttcattaggtccacctcgcgaatcctatttctcgatgcctgcgctcttgaaaatacgagcaactgtatcggtcggctgagctccgttagctaaccacttctttgctaactcctcatttacatgatactcgcttggatctttcgttggatcgtatgttccaatctcctcgatgcacttgccatctctcggggatctggaatctgctactacgattctatagaaaggagctttcttctgtcccattcttcttaatctgatctttactgccattactttcacctccttaaatttgcttaactgatctatttagaatgcgttatacgcaatttctaacattaaaacggaagcttgccgaacattccaccaccgcgtctgcccttcttcatcatgccaggcatctgcttcatcatcttcttcatctgttcaaactgcttcaccagacggttgacctccgcaatatcgacaccggctcccaccgcaatgcggcgcttcctgctcggattcaaaagggaaggattctgtctctcctccggcgtcatggaatagatgatcgcctccgtgcgcgataagctcttctcggctgctgcctcgtcaatatccggcatcttgcctgcgcccatcccgagtcccggcatcataccgaggatactggacagaccgcccatcttcttcatctgactcatcgactccagatacatctcaaagtcaaattcgttcttgcgcatcttctgctcgatcttcttcgcccgctcctcgtcaaagtcctcctgggctttttcgataagggtcagcacatcgcccataccgagaatacgcgatgccatgcgatccgggtaaaactgctccagatccgaaagcttctctcccatacccgcataaaaaatcggcttaccggtcactgcccggatggagagcgccgcaccgcctctggtatcaccgtcgagctttgtcagaatgactccgtcgataccgatgcgctcatcaaaggtcttcgccacattcaccgcatcctgtcctgtcatggcgtccaccacaaggacggtctgatgcactgtgacattttcttttatctgaatcaactctgccatcatatcttcatcgatgtgaagacgtccggcagtatcgatgataacgatgttaaaatcgttcttcgcggcatgttccatcgccgcttttgcaatgttcaccgggctgttcttatcgcccatggaaaatacttccacgccctgcttctgtccgttgatctgcagctgttcgatcgctgccggccggtagacatcacctgccacgagaagtaccttcctgcctttctgcttgaactttccggcaagctttgctgctgtggtcgtcttacctgctccctgaagaccggtcatcatgatgacggtgactgccttgccgggctgcagtgtgatctcggctgtctcagagcccatcagcctgaccatctcttcgtttacaatcttgatgaccatctgtcccggattcagtccgttcatcacgtcctgtccgacggcacgctcctccacgtccttgacgaactgcttgacgaccttgaagttgacatccgcctctaagagcgccatcttgacttccttaagcgctgtcttgacatccgcttccgtcagccgtcccttgctgcgcaggttcttgaatacattttgaagtttttcagataagctgtcaaatgccatctataactcctctaatatctgattggaaatctgttcaatctccacgatcactgcctcgtcatggctctcatgaaactgcttcgtcaatgcatgaatctgttccacgctgcgcttcgccgacatgaactttgcgatcagatgaagcttctcctcatacccctcaagggtcttcgtacaccgcttcaccatatcgtgaacgccctgtctgctgataccttcctcgtccgcgatctctccgagagacagatcattgaacacgaaatcctcataaattcttctctgatgttcgttcagcagttctccgtaaaaatcatacagatacgcctgttcaatcttctcttccatctgaaatcccacaatcacgccgtatccggcatctctcactcattgccaccgtgatagaatagcataaaaggaaaaaggtgtcaagtattttttcttgacacactttttccttctttttacaccgccatcgccgtctgcacgatcatgcagaacaggcatgccgccgcacagattccgtagagaatctcactctttccttctgttgaaaaaaatcccacgccggccaccacgaaccctgctcccgcggcaatgaccggccacatgaaaagaccgaaggcagtaccgctccatctgcagatcacaagcgccgcagcaaaaccgcacgctgccgcaacaagccaaaccatgatctgttttatccatctgcgcatagggatacctccataccttcggttttcattttataagaagatgtatttgcacacaaacagtaccgccagcacatacatcagcggtgtgatcttctttgccttaccgcatacgacattgatgatgacataagagataacgccgatcgcaataccctcggagatgctgtacatgagcggcattgcaagcaggcataagtatgccggaattgcctctgtcatatccgtgaactcgatgcttgtcaccgtagacaccataaggaagccgacgaagatcagagccggtgctgtcgcaaagctcgggatcgagcagaaaatcggggacagtaccacagagatcaggaataagaatccggtcactacagaggagaggcctgttcttgctcctgctgccacaccggaggaactctcaacgaatgtggtcgttgtggaggtaccaagcacagcacctgcggtggttgcaaccgcatccgccagcagcgcttccttgatgcgcggcagtctgccgtccttgtccaacatatccgccttgtttgccacaccgattaacgttccgagtgtatcaaacatatctacaaacaggaatgcacatacaactgcgataaaatcaaacacacgcacattggagaaatccagcttgaagcactgtccgaatgtctgaccgatcgcggtcagatccgtaaatcccagcgccgggtataaggaataaaaaccggcttccgcatccggaacatagattcctgccgcctggcagagcattccaagcacccaggtaataacgataccgaataaaattgcgccttttacgttcttaatgtacataattgcaatcacaaacagaccgatcagcgctaacaaagcacagatgccggcagtcttgaaattgctggtaaagtcaacataggaaacaagcgtggagctgttcgccactacgatgccgccattctgcagaccgataaatgcgataaacagcccgatgccgacgctcacaccttttttcaggttcagcgggatcgcattaaagattgcttcacgcacattggtcaaagaaagtacgatgaaaaccagaccttccacaaaaacagccattaaagccacctgccaggaatatcccatcgcaccgcagaccgtgtatgcaaaatacgcattcagtcccatccccggtgccagtgcaaacggataatttgcaaggagcgccatcgccatggtaccaataaatgatgccagcgcggttgcaatgagcactgctgtcttatccattcccgccgctgcaagcatggtcgggttgactgccagaatgtacgccatcgtcataaaggttgtgatacctgccatgacttcggtcttggctgtcgtgttgttttccttcagtttaaaccacttttctaacattttctttctcctcttctttgtttacagactcgtgcgcaccagcttcggcttataacctttcttctccagcgctttcatgatctgttttttgtgctcggtgccaaagctctcgagcgtaatacggagttccactgccgcgctgcggttcgttgtcacaaactggttgtgctccagcttgatgacgttgccctgctctgcggcaatcgctgccgaaaccttggacagttctcccggcttatccggcagaagtaccgacacggtgaagatacggtcgcggaaaatgagtccctgctgtaccacggaggacatcgtgatgacgtccatgttgccgccacttaagatcgataccacgcgtttgtcggaaacatccaaatgtttcaacgcagctacggtcagcagaccggagttttccacaatcatcttgtgattctccaccatatccaggaatgccacgacgagttcatcatcctccaccgtgatgatgtcatccagatttttctggatatacgggaaaatcttgcttcccggtgtcttgaccgctgtgccgtccgcaatggtgttgacctgcggcagcgtcgttacttttcctgccgcgaaggaagcctgcatacagttcgctcccgccggctccacgccgatgactttgatcttcggattcagaagcttcgccagtgtggacacaccggttgccagtccgcccccgccgatcggaaccagaatgtactccaccagcggaagctccttaaagatctccatggcgatcgttccctgtccggttgccactgccagatcatcgaacggatggatgaaggtatatccctccttgtccgcaagctcgtatgccttctggcacgcctcgtcatagacatctccgtaaagcacgacttctgcgccgtaactcttggtgcggttcaccttgatgagcggtgtggtggtcggcatgacgatgactgccttgcagccgtagcattttgctgcgtatgccacaccctgcgcgtggtttcccgccgatgccgtgatcagcccctttgcacgctcctcatcacttaacgtgctgatcttataatatgcgcctctcaccttgtatgccccggtgaactgcatgttttccggcttaaggtaaaccttgttgccggtctgctgactccagtaatcgctgtataccagctttgtctcaagtgtcacttctttgactttttcacttgcttcctcgaacttgtctaatgtcaacatccgcttttctcctctcctacttcaaataatgcgtttacgaactggttggaatcgaacttctgcagatcctcgatcgtctccccgacgccgatatacttgaccggaatgccaagctccgagtggattgccactgcgataccgccctttgccgtgccgtccatcttcgttaaaataattcccgtgatgtcggcgcactcggaaaactctctcgcctggtttaacgcattctgtccggtcgtcgcatcgagcaccacaagcgtctcacggtacgcatccggatattctttctccagaatacgattgatcttttttaattcctccatgaggttcttcttattatgaaggcgtcccgccgtatcacacagcagaacatccgcatttctcgccttggctgccgccaccgcatcgtagacgatcgccgccgggtctgcgccctcctgtccgccgatcatatccacaccggcgcggtttgcccactcctgcagctggtctcccgccgctgcgcggaaggtatccgctgccgcaagcacgacctttttcccctggtccttgagctttcccgccagctttccaacggatgtggtcttgcccacgccgttgacaccgatcacgaggaccacggatttctccgtctcaaagcgatatgccgtctcgccgacatccatctgctccttgatgctgttaatcaaaagttccttgcactctgccggatctttgatgtgattctccttcactttttccttgagactctcaatgatcgactcagtcgcattgacgccgatgtctcccataatcagaatctcctcgatctcctcatagaaatcatcgtcaatgctggaaaatccactgaaaatggaatctatgccggatacgatattatctctcgtcttgctgaggccctcgaccagacgtccccagaagcctttcttttcctcgcccataatgtactcattcctcctgctatttgtcgagatcgccctcgatcagattcacggataccagggtggatacacccttttcctgcatggtaataccatacagacggtctgccgccgccatcgtgccgcgcctgtgcgtaatcacaatgaactgcgtgctcttcgtcagcttatgcaaatactttgcaaaacgtccgacgttggaatcgtcgagcgccgcctcgatctcgtcgagcagacagaacggggacggctttaagttctggatggcgaacaacagtgaaatcgccgtcagggacttttctccaccggacatctgcatcatattctgcagtttctttcccggtggctgcgcgataatgcggatgccgcactccagaatatcctcgtcctcgaccagttccagcgttccttttccaccgccgaacagctccttgaataccttgtcaaactcggtctggatctccgcgaacttctccaggaactgcttgcgcatgccggtatcgagttcctcaataatgccgaccagcgtcttctccgcctcgaccagatcgtcatgctgtgttttcaaaaatccgtagcgctccgagatctccttataatcctcgatcgcgttgacattgacatcgcccagcttgcggatctcatccttgatggacgcgatcatcttcttcatcgccgcaagatccgtatattcttcgttgcggagctccatcgccgcatgcagggtcagttcatactcctcccacatgtaattgttctggtactcgtgcgcctcctccagcttttcacgctggctgttcagacggaaaatctccttgtccagatcggagatcttcttggaaatgtcttcacgcttctggaaaaatcccttgtattccgaggacatttcttccctgcgcgccgtgtgctccttaagcgcctgctccagctgctcggaattgtcctttgacgccaggatcgtctttttgatctcctcaatatcgtggcgcttcttctccgcatccgccttcgcttccttcgcttccgtgacgaatccctcgcgctcttcctcgtaacgtcttatctcaccgttcacacgctcgagattctgcagaacaaactctaacttctgacgcacaccggcttcctttaactgtacatcggacaccgccttctgggcttcttcctctctgcccgcattctcatccagaatcttctggaatccggcgctctcctcctcgatctgtgcctcccgctcctttgccgactgcagttcctctgcaatcttgtccttgttctccgcaatctcacggagctggctctcaatctcacggttctccatctgtaaacctgcaaacacgttctcgctctcgttcttctgctccatcgcgcgctccacgttcatcttcgcggtattctgcgcaatgtacgcctcctgcaggctcgccttattgctctcgacgtcctccgcaagcaggctctgcgccgtcctgatatcctccagacggtttttaagctctgcaatctgtttatccagatcttttacgttcttctcgagttcttcaatctcgcggtttcttgcgagcagattgctgctgttcttaaatgctccacctgtcatggaaccgcccgggcttaaatattctccctccagcgtcacaatatgtaacgagtagcggttctttttcgccagcttgatcgcatagtcgatattctccgtcacgatcactctgccaagcagataagcggtcactccagcatatttttcctccgtcttcacgagggtattggcaagaccgatgactcccggctcctttaaggcatccgtgtttttaaagttgcccttgccgtccacactcgtcagcggcagaaacgtcgcccgtccgtaccggttctgctttaagtaggagatcatctgttttgccgtctcctcgtcctcggtcacgatgttctggatatttccgccaagcgctgtctcaatcgccgtctcgtactttttgtccacctggatcagatcggaaacaacaccaaggattcccgcgttgcggctcttctgctccatgacgcggcggatgctgttgccgtagccgtcatagcgctccgcaatatttttcaaagactccagacgggactgctgcttatggtactgtgcaaccgcgctctccagcttctgattggcttccagggacttgcgcttccactcccggttctgctcatccattccggcagcgtttttcttcagttctgcgatcgacgcgttcaccgcatcgagctccttctgatagctttccagaacggaggtaagatccgcctcctcggtcttgcgcgcaagcagacgctgcgtcagctgcgccttgcggatgttcacctgctccatcatcgtgtcgtagcgctgctgtctcgccttgacggatgccttgcggttcaacagttcgataatctcgttcttgcccttttcaatgccctcggtgcagcgcgcgatctcctcctgaatgttccgcagctgctctgccgccgtctccttttccgtcgccgccgctacaagctctgtgtcgagttcctgcttttccgcttcgtatgtaccgcgcgactcgatgcgctcctgcttttcccgatcgatcgagtccagacggctctttaaatgctcatcggtcatctccgccgtgtggatctgctcatttaagacattgatctgtccttccagctttcccttggtcacggtggactggctcatctcctcacgaatggatgcaatcttgtcatccatggaagccatgtcctgttccagcttctcgtattcactcttgatattctcgtaagactggctggcttccttcgattcctcgtccgcgatgtgatattttccttctacttccttaagctgcgcctcaatgcgctccacttccagaaggaacatattcacatcatattcttttaattcttcttttttcttcaggtagatgcgggctttctccgcctgacgctccaacggcccgacctggcgctccagctcggctaaaatatcattcacacgaaccagattctcgcgctcattctccagctttttctgtgctgtcgccttgcgctttttatattttacaatgccggccgcctcgtcgaacagctctctgcgctcctccggcttaccgcttaagatgcgctcgatctgtccctgtccgatgatggagtaaccctccttgccgataccggtatcgtaaaaaagctccgtcacatccttgagtctgcacggacttccgttgatcagatactcgctctcgccggagcggtacacacgccgcgccacggtgacttcctcaaaatcaatggcaagctgatgatccgaattatccatggtaatcgccacataggcataacttaacggcttgcggttctccgtacccgcgaagatgacgtcctgcatgctggcgccgcgaagctgcttggcactctgctctccgagcacccagcgcacagcgtccgcgacattactttttccactgccgttcggtccgacaattcccgtaattccgttatgaaaatcaaatacgatcttgttcgcaaatgatttgaatccctgcacttcaatgctcttaagatacatataaacctctctctttcatccagagcaatgcctgatatgccgcctcctgctccgctgccttcttggtatgtccgcttccctcgccaattgtcgtattcccgatcaccgcctccaccaggaaacgtttgtcgtgatccggtccctcctcgccgatgagttcatagtgaagcggttcctcgtaatgcccctgtaccacttcctgcagaattgtcttgctgtcatagaacagcttcttgtgttcaatatccgtcagaatgaagcggtggataaaagcttttgccggctcaaaaccgccgtccagatagatcgcaccgatcacggcttccagcgcatccgaaagaatcgacttgcgtcctcttccgccggtcaggttctcccccttgcccagatacagatactttccaaggtcaatctccctggtgcacagcgcaagcgtcggctcacagacgatgctcgcgcgcagctttgtcagatcgccctccgggagatctgtatgctccttgtagaggaactcactcgacacgacctctaagaccgcgtctcccaaaaactccagcctctcattatccgaaagcttcttcatgtgcttctcatttgcaaaagaactgtgtgtcagtgcctgctgcaacagtctctgctcgttaaactcataaccaatcacttgttccagttctgtcagttttgacattttcttatcctcctcgtctctttcggaggtcttttcttgccctacagcccttgtatagagtaagaaaaagcctcaaaatctctgtgccacgcggcaacgccgccgtacgggttcctcttatcaacaaaagcccttgctttccggacaagggctttatgacgcatcatcaaattgtctcttatgagtttaaagcattcttgatctcttctactgcatctgatacggtcacaatatgttctgcatcttcatttgcaatctcaatgtcaaattcctcttcaatccccataatgatctgaaaaatatcgagggaatctgctccgagatcatctacgaatgtggtctccatcgtaatctcctcttcatccacattcaaaacctctgcaatgatttttttcagcttttcaaattccataacctacattccttcctgttccgcagaacttactatatttttcctgatctttccattgatgtcctcttccttgaacgtcacacactggaaaatagaattcgtaatctcttttgcttttgcacttccgtgcgtcttgaccacaagaccattcagtcccagaagcggcgcaccgccgtactgtgttgcatcgaaagtctttaacgtagactttaatgccggcaatgcaagtgctgcaccgattttgctctttaccgtactcatcatgcccttcttgatggcaccgattaacgtactgctgagtccttcgtacagctttaagatgacatttccaacgaaagcctcgcagacaatcacgtccgcctctccctttggaatctctctcgcctcaatgcttcccacaaaattgacgtcttcacacgccttcagcagagggaatgtctccttcacaagggcattgcccttctcctcctctgcgccgatattgacaatcgccactctcggcttcttcactccgagaacattctccatataaatggaacccatcttcgcaaactgcaccagatgcgaagctctcgcatccacattcgctccacagtcaatcagaagagagactcccttctccgtcggaatcaaaggtgcaagcggcggtctctcaatgcctttgatgcgaccgacaatcacctgtccgccgactaagatcgcaccggaacttcccgctgacacaaatgcgtctgcttccttctgctttaccatattcattccaatgacaatggatgactgcttcttcctgcggattgcattcaccggcggctctgcagtctctatcacctcttctgcatgtaccacctgaatctgatcttcggggtacgtatactttgccagttcttcccgaacgacatcctcctgtcctaccaggagcacctgaatatccgaccgtgcgttcacggcatccactgcgcccttgaccggctccgccggtgcgtagtctccgcccatcgcatccaatacgattcttgtcctcacagccccgctgctctgctgcatactccatctcccatctgtcctgccggagtctagttctccacgcctactaatgaatatactataactctttctataaatcaacaataaaaaatacgcttatttctaattgaaaaattcctgatttcgttcctgctccgcctccagatcttccgccgacatatacttgcggaaaatgcgctccaggataaaattcgccaccaggatgtagactgccggaagcagtatcataagccacggaagcatccacaggccaaaggcgctcgctgccagaagcaccagaagaagcagcgaccacggaagattcgccaccgcaatcagcgccgcgttcttaaacgactgccccagactgttctcaaagcgcgccatgtaggcaaacagatataccgccagcatcacgacaagcacaatcagtaccaggaaaaccacatacagcacgccgctcttttgtccctgcgcagcaaactgatacataatatagcagtccagtcccagaaacagaaccactcctgtcagaatcagcgctgcgagcgccgcctgcttaaagttgctcttaaacgcatgccagtattccttccacagatagcttcttccgtgccggattaccttattgaccgcataatagagcgccgtcgttgccggtcccgccagaaacgatgtcagccagcacagaatccatccgaataccgatgcgctctgccatgccagaaaaaatgtcgttgccatcgggatgcagcagaacacccacagcacgcttaggatcacacagtcaaccaccttactgagtccctgaaaaaacttattatccaaattaaaaaaatcacccatatgaatccttctttctgtctcctatgtttctcctgttattttctcataacatgacacgatcgcccgaagcgggacgccccagtcacgctcgcctccggcgtcctgtgaacatccgaatatcatgctgaccagctttccgttttcatcaaaaaccgccgatccggaatccccgtcggtaatcgccatgcgcacttccgtctccttctctccctgtccccacaggaattccgtctctttccgaagaagacttcccgtcagcgtgtggagcacattgccttcctgtccgatgcgcacgattccgaccggcaactctgcattgccaagttcttcccagctcgcaagatcatacgacaccgtctttagcttttcctgcactttctttggaatcgccgtccggtcaaccgccacgacgcccacatcataaacatcgtcggtacccgctttgcttcccgggatgcaggttccatcataaaaatacacatcccagtcgtcgtactttgctatgacatggcgattcgtacacagatacaccgtatcatccgtcatttccataataaaaccggaacccgcggtatgtcctccctccggcgtcccgtgataaatctgtaccaccgacggcaatgcctgctccaacaccgcttccatagtgtcttccgcgccgtccgtctccaccccggttccttcactgctctgtaccgcttgttccgttcccgtcccggtctgcccgctgcccggtgccatttgttctgtttccactccagtctgtccgctgccttgcggcatctgttccgtgctctgcggtatctgctccgttgtcccgctctcttccccagcagcatcctgtgtctgttctgcacagcctcccagtcccagtaaaagccctataccccaaagcatcagcactgccttcatcctgtatctatgcactctacgcatttcttcttcaatccgtttccaccagtttttctcttgtaccatattcatttattatagctttccataacgccccggtcaaggaacaaaaggcacagcacaaagtgttttcctataaagaaaaaacagccgcgtctccgcggctgtttttccctaaagaatcattttagtaattgtactcggatgcatactcaccatacattgtggtctcgtctgcattgtagttgttgatgtcaacaacgtttccgttctcaatcttaaatacattccagatgtaacctgcctgattcagaggtacattgtactcttttacaagaacagatccctggtatacctttacgtttgcgccagactcagacatctttgtggatgtagcgtcataacgatctgtaaagtcttttacagagtaatagtaagtagcatctgtacgtgcatttacgatggttaccgtctccggtccgtaggagcttacatcatccacatccagggatgcgatcacgttaccgtctgtatctctctctaccttattgtagtaagcgatgtggaatacagagttggcatcatctaatccaaccaggtgggaatcgagatctctcggtgtctcaccccaggtaagaacgattctgaattctgtgctggtaacctcgcttgtgctggtcgggcttaatacgccttcgcatgcaccaattgcattggagcttgctacgtttacaaaagtggatacgaatccgtctcttgcgaactcaagggtgtagtaacctctctcaagagagaagctgtagctgccatctgcatctgtggtagtcgtagcgatcacatcgccggactgattgttccagttcgcacgtacatttacggttacaccttcaataccaagacctgtggttgcattctttgcaacgcctgcaacggtattcacaccgctcatatcagagctcaacagctggaatgtcggcaatgtgaagcttccattgtcagcgttgatgctgatggagttcactgtcaaggttaagtaaccaacagctgctgcctgaacggagtatacacccggtacgaattccggaatctcatagtaaccgtctgcgtctgtggtaatctcatagtaaccatcgcctacaaccagaccattctccggctcctctgtctcctctgtagactctgttgcctccgtagactctgttgtctctgtagcttctgtagactctgttgtctctgtggcttctgtagactctgttgtctctgtagcttctgtagactctgttgtctctgtagcttctgtggactctgtcgtctcagccgttgtctcaacagactctgtagctgcttctgcttcctctgctgttgcattgaagcttgtcagtctgaatgtaactgttgcgcctgcaaccggtgcacctgtctccgggtttgtcagacggccgtttgttctgatcggtgctgtgttggtagaagtattgttgccgttgtcagcacttcctgtattagaagatccgctgtaagaagactctgtgtagctggatgttgctgctacagctgcgctcgcatctcttccctctgctctaccaaactttaagtaatgcttgtaaagcgcaagcacatcgtaaccgaatgctgcctttaagtccggatatctgtctgcgtatgctcttgcatcaaaggtgccgaaagaatttcttccctcattaaagccgtatttgatgtagtgattcacatatgcatcccagttatcgccgaatgccgcatccagatccgggtatgctgctctgtatttctgtacgtcgataagtgctgtgcttgttctgccctcgctcttaccaaatgtcttataatgcttgtacaatgctgtctgattcgtaccgaatgcatccttgagatcgctgtaggtctcagaataatactgtgcatcaaatacatctctcaatgttgctgcagatacggttgccgtacctccgaatgtcaacacacctgcaagaacaagtgctgtaattctgcgagccattccgcttctctttgcggagcgcttcgtttctgtctcgttcaattccttcttcactaacatttcctccttgttgttgtgacgttacatgtatcattgtaaatatctggaacaaaaaaagtaaccactttttaacaatttgttaacactttttttcaataccagaacaaagtatacggagtttccatgagaaccaagtgtgcgcttgccgcacacttgcgcgccctcgcggtatgcaaagcattatttacctcaccgcgaggtgtgcatccccgcggagcgtttttgtgtaataggaacggagtttcctattacacaaaaaagagacccggcagatccggatctcctctgtaccgctggaattagtcctgcggaatgatttcttttttgttgtaagagccacagttcttgcatactctgtgaggcatcatcagctctccacacttgctgcattttactaatgcaggagcagtcattttccagtttgctcttcttttatctcttcttcctttggaagatttattcttcggacaaatagacatttacttacacctccttaaatttgttaaagacatcttggattgctgccattcttggatccagttctgttctctggcaatcgcagttccccttattcaggttcattccgcacaccttgcaaattcctttgcaatcttctctgcacagaactttcatcggccagttcaccaaaatctctccatagataagcttatctatatccagatttaatccaatcaggtagtctgtttcttccatttcatcatccacaacttccgttccgtccatgcggagcttcttgtcgatgacaatgtggatgtccgtcggaacttccgtaagacatctgctgcacgggattgatactgtaagatccgtctccccgctcaaaagcagctcactgccctcgcggttcgcaatcctgagatcaaacggcgcgctcttcgtgatcgggaactcaccaagcctcgatacaaacgtatcctgctcgatatgaaccttctcggtaacttctctgttctcacaagatacaatctctgaaatatcaatctgcatggtttactccttcgcctcatacatatgaggttttcacacctaaccaattatacataggcgtccctggtttgtcaatcacttttttgcttttttgtcaaggaatttcccttgacagcaaaaactattttacaagcgctacagtctctcttgcaatcgcaagctcctcgttggtcgggatcacgcatacctttaccttggaatccgcggtagagatgatcgcctcgtcgccgtgggttgcatcgttcactgcctgatttaccgtcacgccgagataaccgagataagacattaccttctcacgaaccaggttcacgttctcaccgatacccgcggtaaatgcgatggcatctacgccgttcattgctgcgacataggagccgatgtattttgccacacgatagctgaatacctcgatcgcattggttgcaagctcgttgcctgcctcgtgtcctgcctgcaggtcacggaagtcagaggagagaccggacattccctgtacgccggacttcttatttaatacattcatgataccttcgatatcaagattctctttctttgcgatgaattccatgatcgccggatcaatatcaccggaacgtgttcccatgacaagtccctcaagcggtgtcagacccatggaggtatctacgcactcgccgtttaatacggcactgatggatgcgccgttgccgagatgtgccacgatgatcttggaatttttaagatccataccaaggaactctgcggtacgcttagatacaaagctgtggcttgttccgtggaaaccgtatcttctgaccttgtatttctcataatactcatgaggcagaccatagagatatgctttcttcggcattgtctgatggaaagcggtatcgaatacgccaaccatcggtacgttcggcatcagctccttgcaggcatcgataccgatcaggtttgccgggttgtgaagcggtgcaagatcgttgcactcctcgattgtctttaatacttccggtgtcagaagtgtagatgctgcgaacttctctccaccgtgtacgacacgatgtccgacagcatcaatctcggagagacttgcgattgcgccggtcttcggattcaccagtgcatctaaaaccatctggattgcctgcttgtgtgtcggcattgcagcttctgtaatctctttgtccagtccggtcttctggtataccagtcttccgtcgattccgattctctcacagagaccttttgccagtaccgcttcgctctcagaatcgatgagctgatattttaatgaagagcttccacagttgataactaatacgttcataatatcctccttgttttgcgaagcaaaatccgagccctctggcgaggagaggatctgcctccttgttttgcaaaggtctgtctctcacagaccgcatatagttttagtatacgcttgtcacgcccgcgaaacaagccagtaattgccagtttctttgtacaaaatgaaaaacagcctgacaaaaatttaacagtcacaccccgctttcgtgttcgtcaacccgcaccgcgtgcaccacaaaccgcagcccgtcacccgagcaggtggacagtgtcagaaccttgtcatcctttcccaccgtaacgcccgtatccttgtaggaagacttaagcagctctgtgaggaacccgtcaaaagtctcatccggcagatacccggtcgtatagacgtccgaatcttccgggacatcactgtacgcaaaaatctggtagcggtaggctgcatcctccgtaaacacggtaaaatacgcatttttttcataaaagccgtcgtttttatattgtttcagcgaaccgaacatgcttccgtttttcatgttgtgcccgtacagaatcgtgtggcagtcgttaaaatcggggacattgttcccctccataaaaatgcagccggatttcgacgcatttccatagagatcggtatgcaggtaggtctcgtcatccccggaatacagagtgggataattgatctgctctatattgtcaaaataaatccagccggtcacatccggatttgcttcctttagcgtctcaaaatccacctgcaatgcctcataccatgccggcagctcctctccctcctccgccggatcatccgaagatgtccccggctgtccggtcacataagcctcgcgcagcgcctcgtaggtatcgtccgcccgcttgtacgcgagcagcgccgggatcagttcataaagggctgccgcaatcagcaaaagtcctgccgcaatcagaagaatcgctccaatgtttctgtttctcttcacgtgaaatgctcctttttctttttttctatttcacagtatgctatgatagctacagtttttattacattgcagtacgggaggatccgccatgaacgtcattggcattatcgcagaatacaacccattccacaacgggcacgcctatcagatcgcgcatgtcagaaaaaatcttcacgccgactatatcgttgtcgccacaagcggcgactatgtacagcgcggagagcccgcccttctggacaaatacacccgtgcccgcatggcgctctcctcgggtgcagatgtcgtgctcgagcttcccgtactctggtccaccgcttccgcagagcttttcgcggacgccggaatctccctctttgagaaaacgggctgcgtaaacggcatctgttttggcgctgagagcggcgaccttgccctccttcgccgcattgcggacgttctcgcggatgaaccggcggatttaaaggcttccctgaagcacaacctaaaatccggcagtacattcccaaaggcaagggaagctgccctgctctcgtatttttccggctccgccggtcaggatggcgccctgcccgtatccgcagaggcgctctcctccctgctcgcctccccgaacaacatactggctctggaatacttaaaagcgctgcgccgccgcgcgtcttcgatcacgccctatctgctaaagcgggaaggcgccgcgtaccacgaaacatccatccgctccggcgcctccgaagtcccggcctccgcatccgcgatccggcatacactcttcgccggtggcgccggagcatccgaagattctgccgacgggattctgcatcatgccatgccgcaggaggcactgtccatcctgcaggactaccgggcagattttccgctgctgtgcgccgatgacttttccagcattctgggttatctgctgttaagcagttctgcctcacaactcgcccggaccgccgattcctccccggaatttgccaaccgcatgcgaaaccagcttccttattatacctctttttcctccttcgcgtcacggttaaaaagcaaagaaatgactctcacgcgcatcaaccgcattttgctgcactccatccttggcattacttcttccgattacgcatgcggcaatgccctggataaaattccctatctacgcattctcggctttcggaaaagcgccgctcccctgcttgccgcactaaaagcctctgctgcagttccgcttatcacacggccgtcgcaggcgccaaagcttttgtccccggatgccatgcaggtgtttgagcacgatgtatttgccgggaatctctatctgcagatgcgcaatcaaaaaggcggcacgcctctgcgcgccgcccgcatgcaggagcatgacgttccccccgcctccgaatatcagcggcagatcgtcatcctgccatagtgcagtctcatttttttgtcttttttccaaatacggcggcggacagcagtgctaccagcgggaccgtacacacgatacccacgcttcccgcaatgcactggataatctcgatcgccacaaagtccgtattcatcagctgctgaaagctgacgtcataggagtagatcatcaacatcatgttcagcgatgtcccggcgactgccaggattagcgtgttcgccatggttcccatcgcgtctcttccgatattcatcccggaggcaaacagcttcgccatgccaagcgaccgatccacctgatggatctccgccaccgcggaacagatactcatcgccacatccatcacggctcccatacacgaaatcagaataccgcacaaaaacagatcccggatcttcagttccgtggtgcttgtgatcagaagcagtgtctccgcctcatccatctggtaggtcgtaatcgacatggcattctgcgcgatcagtgcaaacactgctcccgcaagcacacccagcatgcttccgattgccgccacaaccgtcttggtcgagatgccgtctatcaggaagaaactgacaaaattgcagaccagaatgagcaggatagtgaccgccagcggcgagtaacccttcagcgcaagcggcagtaaaatccagaggatacataccacggtaaacgccagccccgccacagattttgcaccttttttccctccgatcaatacgagaagcagcacaaacgccacgatgcagccaatcatctgcggaacgcggtaataattgtagaccgagacctgatattcgtcctcccccgtcgtgtcgatgcggatggagactttatctccctccgccaccctgacgttgtacagggagctgaaataattttccacaatagccgtgtcgcccttgtaacgtccagtaaggatctcgacctccagcgtcatacttccccgccagattccgtccatctcctcatccaccgtcttgtgatcctccacaacccgcaggactcttccgacctcatagtccgtccccgccatgttgctgctccggtaaaccggtctgtctttattcgcgaaccagatcagtccgcaaaaagcaacggcagccagtgccagaagcaccaggctgcgtatcttgctctttttgaaattcatgttttaaccacccttatttcaaaaatatccttttcttgcgtgctgccgctgcaagcagaaccatacctgcaagaagcatcatcactgctgccgcaagcggggtgtcgtctcccgtctgcactgcaggcatctgatccagcaccaccacataatcggatgcatgtacaaaggtaagctccacatttccgtttgcatctacttttccggaagatgccagttccagccgtccctttgcttcattgtaataatataactttgcatacatgcccgcatactgtgttcccaccggcagcgtcatcactgcggtaaaaccgaatgcaccgtcatgatttaagctgatctggaaatagtctcttcctgccgcggtctgtcttgcaagcgcatccggcacggcatggctgttgatcgtcacgccgaagtcaatgtctgaaatcgtatccgatgtcacacttcttccgtcaatcgtccacacgattccgtttgccagcctaaataccagacgtacatcccttccgcgcactgccgcaataacatctcccggcacagaaacaccgtctgcaagaagaaccgtcacggtgctgcctgcggatgctgccccaattctgtttctgaccggatcccagtcattctgtgaagcaaccgtcaccgcgtctgtcatctgtccgtccgatacggtcacgctgccgcttacacttccaccgtttccagttccgtccgtgctgtcatttccgctgtctgacgaatctgttcccggcgtctctgtatccggtgtctcggtattgcccggcgtctccgtgtcatccggcgtctccccggacgtcacttccacgatctcatcgcagtttcttacacgcagacaggtcactgcctcgtccgaggttccctccggatgtgcatagaccacgccgaccgccgacacgcgttttcctgtcgacacaaccgatgcgagttcattctttcctgtcgttgccgataagatatatccgtcgatgaaaatattggcattgacgccgctgccatcatccagccagaactgtgatacgccggtgcccgccgcatcatagagtacatccgttaccgttccctccacctgtaccagcttaccgccggacttttcatagtccatggcgtcttttgccgacagtttctccggtgcaatcaccttcggctcctcgtccagaatccggctgcttatcaccttaagctctttatcgccctggtaggcgtccacatatccggtaatctccaccttggttccgatggcaagtccgctctccgcatacgggaaaatatcaattcccgcggtgtcgtcctggatatagatcgtatcaaagaaggtgttgccctccgcggctgttcctgcggtcacatagccttccacgcggtagacatcgcccgccgtaccgttcttacgcacttccgcaatcgtagacagcggaagctccactttcacttcatctaaaatattttctgcaatcgtgcggtttaagtatggcagatcccagatattgtccagctccgccttcacctcaaagtcggaaataaatacggttcccgcaacaaatacatttgcaccgcttcccagtgtctcatgtgcgagtgctaccatattgcctttttccacatacgtcgggcttccggtaactctgtttcccgcatcatccttgcagtcgatcgaatacgttgtatcatatccgctcacaagcgcttccgcacgtccggctgtcaccgcatccgcatccagcgccacggtacatccgctgtacgcactgtactcctgctcctcgcttgcgccgcgcagatatctggaatccttgttgtaggttcctttcagatataagcggtacggctgtccgccgttgttcgtctcgtcgtacgcctcgtcgctgtttaatctggtcgatgccccgatcgcagccaaaagcttattcatctctgtcgctgtctgtcccgaagtagaatcctgataatcggcaataccgcaggtaatcagcgtaccgccattgtcggtatagtcttttaccatctggataaagctgtcttcaaaatgcgacacggtgtaatctccggcatttgctgtcccggatttcttcgccggtgccgagatcacaagcaacgcacagtttgcaagcatctccggcgtaatctcgtctgtgaccacttccaccttgacgttctttgctcccgcaatcgccgtaaagtttccgacgttaccgccatagtaaccggtcacataatcgttgtaatgggttccgtcgatgataacctttgtcaccatctccgttgtcgcgtagcttaattttaagacgctcttgtataccttctgcacgccgttcatcgtcgcatgcacaactgctgtcatctccatgctgccgacgccgtcataggtatagtcaaagctgtagcttcccgtgctcatggatgcgacgcttcccaatcctgctgcggcaagatccgcctcatgtacggtctctccgcccacctcaaacgttatggaatcaatcgcgagctcgctgttttcattattatagagtccaaggttcaccgtcagcggctctccccttaccggaagcacctcgtccgtggaaaagctgtcaattcctgccgcctccacagagcctacccataccggtgccgtcacggcgatatcactgtccgcttccacaaccttgatatagtaataggaataatcatttttcacatcaaaggtgaccgtctcctcgtttccggaaacatttttctcggcaagcaccagtcctccgtttgtgatgacctgtactttaccgatggacgcatccgtcggatcacttaagtcaacggaaagatgtacggtatctccggtcgctccatcctctaaaatagaacccatgatgtagccgtccagcgtgtagtagatgctgaggtcgttatcctctgtcgcatacacgcggtaattgcgcatggcatcgtaaatattttcctgcgtcaggctgtccacaaggacaacggaacgcgccgtgtttgcatcgccccacaagcctttatggttatcctggttgttggtcggagcaagatgccagcccttgtccagcgcgcgctggtaatactcataggacgggaagtaacccgaacttccgatcgcaccctcgccgtttccgacctcgatcgtcgtaatcagcttgtcgatctcctcgtcatagtatgcgaaatcgctgaaatcaccgaacgtcgttcccgggtggttaaactggctgatggaatccggctgtgtctttaaggtcgcgtaataattctgcaatgccgtgctgtaagtcttgtactcattctgggtacggctctggaagccttcggtgttaaacgtattgatgtgtccaagtccgttcgaccaggtcatctcaaacccatagatgcacacaaatccgcttgtcgtatactgcgtggcaagcgcatggccttccttccattcctcactcatcgagccgtccgagatggacgcgctgtccgcattgtcaaacgagttggagtgatctgtcaccgcaacaaaatccagattgtcaacgttcgttgcatgctggtatgcatcctcacagcttcccgcaccgtccgaataggaagtgtgggaatgtaactgtccaaagtaaatctgatatttttcgtttgtgcgctcggtaaaggaaagtgtgagcacactgctgtccaggtaaccgtctttgacggctttcaccttataggtaaccggaagctctgtcaggacgagcttttcggtataatcctgccaggttgcaccgtcgtccgcggaatactgaatcgtcgcaccctcggtctcacaggtgaggttcaccgcggtatttttcaccacgctgccgccgttcggcgttgcttttaccgttgccacctgtgcctgctgataagagaatgtacggcggatgctgtccttatagccgtcctttgtcgcataggcagtcacaactgccggaaggtctgcaagctttggcttcgccgacgcatcatagatctgctccgcgccgccgtttacactgtaatggattgttacaccctccgtggcgcttgtcagtgtcaattcactgcccacagctatcacgccgctctgcggttctgctgccacatatccgcagagatctgaggcgatcagcggattgcctgtcactgtcaccgtgtccatacggatcactccgcccgctgccggtgccttatctcccttggcagaaaggctgcccgggaccatgcggatgtagagacggtctgcattcgccgcctcgttcggaatatcaaacgtgaacgaaatatagtttgccggcgcaaggcttgtctttgccacaccgtcggtaattttctccgcggcgctcacttcctgcggctcaccgcccacgtatttcgtgtacttataagcataggttcctgtggaaaggtttttaaaatccacaccgtccgtagaatactgcatctggaaggaacctgctccggtgttgcttgcgcgaagccggaaggaaagtaccatgttggcatagcccgttgtcggcatcacaaactgcgcatagtcattgcttccgcttccaatgccctttcctcccatataataggaagtcgaaccggtggaagtgcttgtggcctcggtatacggtgccactgccgctccatttaccaccgccgaatatatagcatccgcatccagcagatcatttgcattgagagaatctcctgcaattccggtatctgccgtcacacctgccgtcttgtaatctgccgttccggaccactgtgccacgttttccgtgacggactcgtccgcacggatatgaaccgacggtgttccctcatcgatcagataaaaatagaatacatacgccgcatccgaagatgatttgtagctgtatgtcgtaaaaccgctgtaatattccagatactgttctgtggtattattatattttgcgttggcattgatcacatagtatccgccgttctcatttgccttctgcagcttccagagactgtaatctcccgccgcgtccgcaaacgtcacggagctgcccgttgcgccggacgtcagatattttccaccgcatgtaaaagtataatagccgttttcatccacggaaaccgtaagttctgccgcatcttccggaatggcaagcgcaccgtccgccgcagtcgctgacacgccctttaacttcttgccgcttgctgtctgggagagcacgcttccggttccgttgttctcgtaatagagggcaaccatatttccgtccgaaagtgtggtggcaagtgccgcctccttgctctttgcaccctgttttaccgcgtaggcaaattctgccgtctcactcgtctcataaccttcgagttcggctgtcgcgtagatcgtcacatcttcctcgatcacaagcgcttcggtgtatgtcttgtctgcattgtccagatcggtatggtatgtgatcgttgctccctccgtcgcacaggagagctccaccttcgtaccggcttccacatctcccggctccacggaagctttgactttggaacagaccgttccgtctgtcgccacctcgccctgtgttccggtgactacaatgttgttgatgctggtcacaccgttcgtgccgactgtactctggttcacactcgtgtttccctgcatcgtcacacgcagtgtaaacgcttttccggacagcgccgccgggagtgccgtctgctgatacaccggggcaagatccgtgcttaaggtcacatccgttccgctaatctttgtccagctcgctccgtcaatggaatattccagtgcaaagttggcaggaccggttccgctggagcgcatgtctgcggaaaatttcaaatctgtgtaacctgcagcattgaccgcaaccgtaaagcccgctccctcgctccatccttttgctgcgattcccttgctgaatccgctgtaagatactccgcttacgtcaagcgttccgctgcccgttgtcgccgctgtcggaagtcccgcttccggtgccgccgtgtagctgaaggccgcaaggctttctgcacccgcagtctggatgagcgccgtattctggtctgccccagactccgtattctgtaccgcatccgcctgcgctgcaccatctgtctgcgctgcatccgtctgcactgcaccatctgtctgcgctgcgtccgtctgaccggcgttccctgtctgcgccgcactttcctgatttattgtgttctgtgcaccttccgtgctgtctgctccgctctcctctgccggtgacggattttccgccgcttcacttccggcagtcgtctgcacctctgctgcatacgccgtaacaaaagacgcatctcctgctactgtcgaaaacaccatgcagaatgcgaagaaaagcgcacatatgtttttccaatgattctttttcttcattttcacaactgttcctctcatttttttgtatgtaaaataaactgtaacgtttatgaatcttctcttctacccttgtccggtaaagccttgtaaaaaaagtgtaaaaaagaatctcgcttgcgagattctccgcgcgcgagcggttcgcaaagcgatattttccctaccgcgagccgcgcatcctcgcggagcgttttttatttcataggaaggttctactttcacacatgaatgtatcacggtatttcctatgaaataaaaaagggctgatgcaccctgcatacatcagccctctttggctcttcctagtgatggaacaggcggatgcccgtaaatgccatcgccatatgatatttattgcaagtctcaatcacatgatcgtcgcggatggaaccgcccggctgtgccacatacgcaacgccgcttctgtgtgcgcgctcgatgttgtcgccaaacgggaagaacgcatccgatccaagagatacctctgtgttcttatccagccatgcccgcttctcctctgcggtaaacacaggcggcttttctgtaaaaatattctgccatgcgccttctgccagcacatccatgtaatcctcgccaatatagaggtcaatggcgttgtcccggtctgcacgtttgatgcccggcttaaacggaagggaaagtacctgcggcgactgacgcagccaccagttgtccgccttggaaccggcaagtctcgtgcagtggattctggactgctgccccgctccgataccgatcgcctgaccgcccttgacatagcacacggaattggactgcgtgtattttaaagtgatcatcgcaatggcaagatctctcttcgccacctccggaatctccttgttctccgtcacaatattgtcgaagaaatgttcatcgatcaccagctcatttcttccctgctcaaatgtgattccgaacacttccttatgctcgatcggtgccggcacataatccggatcgatctcaatgacattgtaattgccgtttttcttcgcttttaaaatctcaagtgcctcatcagtgtaacccggggcaatgacgccgtccgatacctcccgcttgatgacaagcgctgtctccttgtcgcagacatccgaaagagagataaaatcaccgaacgaggacatgcggtctgcgccgcgcgcacgaatgtaggcattggcaagcggtgtaaactccacatccatgtcatccacccagtagatcttgcgctccacctcggaaagcggaagtccgactgccgcgcccgccggcgacacatgcttaaaggaggtcgctgccggaagaccggttgccttttttaactcggacacgagctgccagccgttgaatgcatccagaaaattgatataacccggtctgccacaaagcaccttgatcggcagttcgccgttctccatatagattctggacggcttctggttcgggttgcagccatattttaattctaattctttcatgatcctattctcctcacacgttcttgttgatgattctcgtctcgtattttccgttctcaatctcaatgtaacgcacaaacaaagatactttattgtctgcgtttaagttctcccagaccgtgtttgtgaaggtgtcgatgtctccctcgatgccgacaagcttcggctctccctcaaaactcggcagcggattgccgtctcccatgtatgtatggataaaatgtccctcgccggccaccggattctggtatgcaaacgtatagcggttgcaggcgtccggattgccgttgttactctttaaaatagacatcgcgtagttgtaggtattgttctcgatgtgcatgataccggaaatccgcggtgtatagttcggtgcgtccggctcaaactctctggtgcgcagcgcctgctcgaacgtctgctgcttgtccatcagttcgtaaatcgtatcggtctgatcgccgtttgtcacgatcgtcttgttgccaagcacgcggaccggtgcataaatgatgagactcggatctgtcagcttggacggatcaaatgcctgtgtgcggattccttcaccatcctccacaaagaccctgttgcggctgttctcgcttcttcccatgataaagtatgcggttaccgcatattttccatccccggatctgccaatcacaattcctcttcccggatatgtattggacgaaagttccttcgcaagtaacatcatcttcatgattttcctccttcacatcacacattgctacattgattgccttcttccatcttatcatgcggattttctttttacaaggaatgcgctgtcattagtatcatgaatttatttactgaattctattagttttacttatctatatcgcgaagcgcctgcatcagaagcccggcgcggttcttccacctgtgccgcttttctgccatccgatatccccgctccgccagctctgccatccgcaccggatcctcaagcaggcttaccacctgatccggaagctgttgtaacgccctcagggagtaaaagcagatattttctccgtcccggcactcttcccgcagataccggctgtcgtccgtgagcgccgccgttccctgcagcatcgccgtaaagacgcggtcatgcgctccgtctttgaaccagggcatcacgtttaacgcgatcctggcatcacgcatcgcctgcacacacgccgccgagttcacttttccgccgctcgtccgcacgttctgcggctttttgcagtgaatcttctcccagtccgctccgaatacccgcactatgataccggcatccgcgagcgtctgcactactttttcccggacatagctgcggataaacagatcaatccagatcatcccggacatcgccgcgcaaagctgctcttccggcactgccccaagctcgttgcggatgtgccgctccataaccgcatctacagactgcgcgggatccgcgatcagatcttccgtgatccgccggtaaaagatccggtaatcgtcatccagcgcctttactttttcctccagcatctccatcgacacatagttggcagtgaatacaaggtcaacggttctccgcccatacggcacgggctctggtacatccactctgtgcgttccgtgttccccgtctccatgcgaaaaaagaagttcattgcccgccagcggcaggaactccaccttcagccccgggtaaaaacgcctcacatagccgacgtgctctctgtccacacagaatacccgcatccgctccccggcttccttcaggcagctgtgatagtagagcggatgatccaccaaaatattcaaaatcggaagattctcctcctgccagatactgcgtccgctctccgtctgaaacacagcctccccgcgcagcccgatgaaattaaaggtgacaagtgccgtctcttcccggtccagaaaatgcagcattacatccatcgactcatacatccgctcatagtcgataaagcaggtctcatacccgttcctctccagttctcgtgcaatctgttcggaaaaataccccagcgtctccaccgcattttttatgaaaatgatttttctgatctctgccattctgcccttcctctgtccggataaaggaaaaacaacctccctgaatcatcctttcggattctgtctgatcagagaaggttgttttccatcacttattttctatgactcacattcgtttttgatttaattcttgaagctgtggatcggtgccgggattctgccaccgcggttgatgaacgcgtcacaggagaactggttcaccggcatgatcggcgcatagccgaacagtccgccaaattctaccgtatcgcccaccccttttccgataaccggaatcaggcgcgccgcagtcgtcttctgattcaccatgccaagcgccatctcatcggcaatcataccggatatggtcgtcgccttggtgtctcccggaatcgcaatcatatcgagtcccacggaacatacgcaggtcatcgcctcaagcttctcaagtgtgatcgctcctgcctgtaccgcatcgatcattccctgatcctcgctgaccggaataaaagcgccgcttaatccgccgacataggaagacgccatcacgccgccctttttcacctgatcgttcagcatagcgagcgccgcagtcgttcccggtgctcccgcatactcaagtccgatctcacagagaatgtccgccacggaatcgccgatcgccggtgtcggcgccagagacagatccacgataccaaacgggatattaagcagtctggatgcctcctgtgctaccagctgtccgactctcgtcaccttaaacgccgtctttttgatggtctcacagagcacctcgaagttctcgccgcgcactttttccagagcggtcttcaccactcccggtccgctgacaccaacgttgatgatcgcatccgcctccgtcacaccgtggaacgcgcctgccataaacgggttgtcatccggtgcgttacagaatacaacaagcttcatgcagtccgcagaatcgcggtcttttgactgctctgcaagctctaagaggatctctcccatcagcttgactgcatccatattgatgccggtcttcgtggatgcaaggttcaccgaactgcagacacgctctgtccggcagagtgccatcggaatcgagtgaatcagcatctcatccgccttcgtcatacccttcgacaccagtgccgaatagccgccgatcaagtttgctccaactgccttggccgcgcgatccagcgtgtccgcgatcgtcgcaaaatcctccggcgtcttgcaggctgcgccgcccaccagcgcaatcggtgtcacggagatacgcttattgacaatcggtatcccgtactcgttctcaatcttctctccgactgccgccagatctttcgccacggtcgtgatccggttatagatattctcattgagcttttttaaatcagaatcaatacactccaaaagactgataccaatcgtgatggtacggacatcgagattctcctgctccaccatcttgttggtctcatttacttcccatatgttaatcattccgtctatccctttctgtggacgttatgtccatcggtcgatcttcccgcacatctgcctagattctgtgcattttttcaaaaatctcttccttctgacatttgatggacacgccgatctgctcccctactgcatccagatccttctggcagtccccgaaagttctcgacgactgactcatatccacaatcatcatcatattaaaaaatccggacacgatcgtctgcgaaatatccagaacattgatatgattctccgaaaggtaggtacatacctttgcaataataccgacggtatcttttccaacgactgttatgattaccttgtctactgtattctccatgccaatctcattcctcctgcttccacgttatcactttatcgtattaacactgattataatacacagggcttttataagtcaatgcttttagattgcttttgtgccagggcagcatcatcattctcttattcacccggtagacgcgcacaccgtccgtcagccggatcacaagctgatcgtgcgtcacccgccggaaaaactgcacgctctgaattctctcccccgggaaaaacaaaaacccatacgggtcgagtctgccggtgagatcattcaccacgatcacagaaatgcccgtcctgccgaaatgaatgacaaaatgctgcacctcaagcatcgtcgccatcatcgtccgcataaaggaatactttggcagaatcaccgcatagattgatgcatggtcggtgtaaggaatattcctggcgtatagataattctgaatatcggattctttgatcatcttgttcgtactacctcaattccggcgcctgcctccaaaagagctcttcgcctgtttcttttatgatatccgtgtctgccggcatatgcaatttcttttctcccaccttagaaccgcaccagctcggacggctcgtctctctttgccacatacatcggaaaatcatcccccttataaggattatctcccatcgccacttccagccgcaccgtctcgtacgcaagttccgcgtagttattttccttggacagatgtcctaaaaagaccgtgccgaaatgatcgtgcagcacctccccgagcagccgcccggaaagctcgttggacaggtgtcccttttctccgagaatacgctgttttaacggatacggatagcttccgacctgcagcatatgtacatcatgattcgcctcgagaagaagcacgtcaagcccctttaacttctccacaatatggtcgtcataaattcccagatccgtcatgaccgccatggattttccgggctgcttcatcttatacgccaccggctctgccgcgtcatgtgagatggcaatcggctcaatcgtcatatctccgatcgtaaaatcctcctccgcatgaatctcatgaaacagggcgggatcgatcgttccgacggatttggtgtgcagtatcgcatcgatcgtccccggagtcgcatacatcggcagaccgtaacgtctcgcaaggacgccaagtcctgcgatatgatccacatgttcatgtgtgatcagaattccctgcatctcttccgttttcagatcaatcgaattcagaccggattcaatccgctttccgctgattccggcatccactaaaacatgacattcatctgttcccacgcagatacagttgccactgctgccgcttgctatactgcataattccattttatttcttccactctctatctgttaatttcctgccagcgaagctcgatctggtctccctcggagagcactgccgaatactgtgcctgctgtccgttcaactttgtgatgatcgctcttcccgcagatgccgttaaatcaaaatcgtaaaaatcaaaaatatctacaaagatgtagctcttctttccggtcagacgtaccggctgctgattgataaacacaaccagtcccagatccgtcttctgcgaagcctgctgcacttccccttcagccggctgctccacagcgctctctgctcccgtggcatctgtcacagatgaaggttcctgtgacattccatgctccgcttcctccgcctctgtaccggtctgtgcctcactctctgcggcatccacttcctctaccgtctcagccagagtctcgtccgctgtctgctccgtcccgccagccgcagccgtcacaggctgctccgcaaccggaagttctgccggatccaccgccgctgctccgaaagaaagcaccacccagtccacggaaaagttctcgtacacaagactctccatggttgccacgcggttattcacaagaatctcatgatctatgtccacttccacatccataaatgccgccagctgctccacggtatagaagcttctcgtctcaaccgcatcgccctcttggatctcataggacggcagttccagacttccgttgacttccaggcacttcggacagcgcacaatcctgccgttgacgatcaccttcatatccgaagaggaatactcatccagctgctctaaggtacaaaccgccgcttcaccctgtgtcgacgcttcgatcacgatgtcgctgttcggctccaacggggtgttgatgttgaccagacggtcattcatatagatctcggcggactctcccagttcacctctgacaatccgcggtgtgccgttcacggtaaaattaagttccttaccgcgcttcgggaacagttcctcattcgggaaaccggcctgcagagccgcatccacgatcgtaagcttattgttgtcatacagcttgatccgctccccgttaaagcgcaccatgataaagctgtttctctgatcgtaataatttaggcagataccaatcggcgtgacgagcagcgggtccttctggatctctgtctgaaggaacgtcacttcctgcagcacttcctcaccgcgcagcgccacacgctctgccggcagatccagcttctcggcaagcatctccgtgtagccgtggatcttaccgccgccgccgacgataaacgccgcactgacgctcttgtctccgttcagctccttgatcttcgccgccacctctgtcgtcatcttatccaccaccggctccgtcagcttccacacatccttcgacggaatcgtgtgctcgatcatcataatgtccttataagtcacctgatcttccataccgctcgagagcttaatctgctccgccgtgttgaaatccaccagataactctgcacgatcagctcggtgatctcatcccccgcaagaggaatcataccgtacgcgatgatgcttccgtctctcgtcacggaaatatcggatgttcccgcaccgatatccacgagcgcaatatttagcagtctgtaattctccggaatcgccacattgatcgccgcaataggctccaacgtcatgtttgccacggtcagtcccgccatgccaactgccgcatacagaccgtccacaacatcctccggcaggaacgtcacgatgatgtcctcgctgatcctctctgccttatgggattccagactggagaacggttcatcatttaagaaatacttcatgacggaataacccacacagtaaaacttgtagcgggtatcgttcatttcctttaaaatggactgtgccttttcaattccaagcagatccagtgtatgaatatcctcgccggtaacgaccgtctcctccgggaaatcatagctgatgttggtcgtcaccgtctttaacacacggcctgcggctgcaatacacacttcggtcagttcctgcccgatctgtgactccagctcctccttcaccttggcaatggtatgccccacgcgtccgatatcgtgaatctgaccgtccagcatggcacgcgtctcatgctcaagcatatactgtgccaccacgacaaattcattctccgtcttatagcctacggttcccaccacatttctcgttccaatatcaagaccaaacaccagcggctggtcgaatacgctcgtatcgctcatctgcagtatctcctaatctctatttcttctccgaaagcgccctgtcaatctgcgcaaaagcctccgccacactgccgttgttgtcaatcacaaccctgcagtgctcccggtagacttcctccgtcaactggcttgcaaaaatccggtctaccttttccgtggaatatcctctgcttgccatcaggcgttctctgcgaatatcctctctggtataaatataccagagttcgtcacaaatttcatcataatgttcttcaatcagaagcgctgcctccagcaccagaagttttcgttttccaccctgcttttctctcgccgcctctttttccacatagacgcgcaccgccgggtgtacaatggcattcatctgcctgcgcttcgcctcatcggaaaaaatgactgccgccagtttcccccgatccagtccgccctgcggcaggaaaatatcctccgcgccaaacgtctcacagatcctgtcatagcactccgtcccgggagacatcagctcatgggcaatctcatccgcaagcatcacgcgggtatccggcttcttcgccagatatccgagtatttccgacttgccggctcctacaccgccggtaattcctataaatctcatcgttccactgcacctctattttgcctgataccagtcacttcccgcatgcacatcaatctcaagcatcaccgacaactgtgctgccccgtgcatctcttcggcaagaatcttacgcacttcctgctcttcctctaccgctgtctccaccagcagttcatcgtgcaccgtcaaaatcagccgggattttaacccctccgccagcaggcggtcatgcacccggttcatggcgatcttgataatgtccgccgccgttccctgtatcggggaattcatcgcaatgcgctctccgaacgaacgctgcataaaattactcgaggaaagttccggaatcggacgtcttcttccgaacatcgtcgtgacatagcctttttccttcgcctccgccaccagtccgtccagataccccttgatcttcggataggtctcaaaatagcgctcaatgtactccgccgcctctttcttcgtgatggagagatcctggctgagtccgaaggagctgattccgtagacgataccgaaattgaccgccttggcattgcggcgctgcagatcggtcacctcgtcaaacgggatatggaatacctgcgacgccgtcgtccggtgaatatcctgtgcattccggtatgcctcgatgagcttctcatccccggacagatgcgccagcacgcgcagctcgatctgcgaataatccgcatccacaaacacaaaaccggtctttggcaaaaatgccttgcggatcagtcttcccagttcaatccgcatcgggatgttctggagattcggctccgtgctgctaaggcgtcccgtcgccgtgatggtctggttgaatgacgtgtggattcttccgtcctctgcgatatagttcaccagaccgtccgcataggtggactttagcttggtcagctgtctgtactccagaatatccgccacaatcgggtaatccggcgccagacggtccaaaacatccgccgccgtcgaataaccggtcttcgtcttcttgccgttcggtagggaaagcttttcaaataaaatcacaccgagctgcttgggagaattgatattgaattcctccccggcttcctcatagatcttacgctcgagttcgtcaatgcgcacagcaagcctgtctccgtactcctttagtgcctccccggacgcaatgattccttctttttccatatctgccagcgtgaagacaagcggcatctcgatctcgcgaaacagcgcatccattccggtgtccgcaagctctttttcaagcggctccctggtcttgtatgcaacgtatgccatatagcagatgcactttaaaaattcctccggctttttctccgacgccttctcatacgtgagcttctcaataagatcctttctcgacggaatcatcagtcccgcataatccttggcaatgtcctcatacggatattcattcttaatcgggtttaaaaggtaggccgcgatcgtgttgtcgaacaggttctcctccgagattgttccaagacattttttctcaagcatccccagttcctttaactgcggctttaagtcaagtgtcgcataggaagcggctgcactccccgcaaacaattcacggatcttacggcagggaagtgcttccgatgcctccacgtaacagatttcctcctcaccacatgcaactgcaagtccgagaaaatccgggatatgacagcttcctgccgtctcctgctgcccagcctcttcgccggagttctgcatcgcaaagctgccaaacagattcatctgaccgtcagcctctgtgtgggcgtcatgcgtttcctcctgtggcaccacatagaacccgcatgcttttccacgcagggatgcaaaaaatgcttctgcctcctgcgccttttctatcttcttaaaatgctcctccgccgtattcttcggtgcttccacggagaatctgccgaggagattcttaaattccagtctcttacacaacaaataggcttcctctgtatacagatcggaaacctgttctaaatgcgcgtccgcaagcttgtaggcaatgtccgcatcgatatcgatcgtcgccagcgtcttgctcatctgcgccatatcataatgctcttttaaattcgtgctcgctctcggcggctttaattcatccacatgtgcgtaggcattctcaatgcttccgtattttgcgatgatcgccgtcgctgtcttctcgccaatgccgggaactcccggaatgttgtcggaagtatcacccatcagtgccttcacatcaataaactccgtcggcgtcacctggtacttctcgaggacttccttcgcgttgtagtcctcaatctcggttcccgtcctcttcgtcttcggaatccggatcttgatatgatctgttgcaagctgcagaagatcacggtcaccggatacgaccgcaacctccacgcctgccgcctcactgcgctttgcgatggttccaagcagatcatccgcctcgtaaccgcctttttcaatgatggtcacacccatcgcgcgcagcatctctttcatcaggggtacctgctgctttaactctgccgccatcggcttgcgggtacccttgtattccgcaaacatcttgtggcgaaacgtcggctcagacacgtcgaacgcaaccgtcaggtaatcgggctgctcctcctccagtatcttgaacatgatatttaaaaatccgtataccgcgttcgtgtgaagtccctcggaattggtcagatccgggattccgaaaaatgcccggttcaaaatactgtgtccgtcaatcaataccagcttttcgctcatttctgtctccgtttctagattgctcttgtatacttcttcagccactcattctcttccggtgtcatgtacggagagagtgtcttgtataccattgcatgatagtcatttaacatcttcttctcacgtcccgtcatctcgtccggatcaatggcatccagatcaatcggtgcataagtaatattttcaaaattcatgaactggccgtactcgtttttctccgccttgtggcataccagttcgttctcggtacggataccgtacttgccttccagatatacgcccggctcatccgtcgtgaccataccctcttccagcgtgccgttatcatggcgctccggcaccactctccagcggaagccgttcggtccctcgtgcacattcaaaatgtagcccacaccgtgtccggtaccgcacttgtaatcaatgcccatctgccagagcggcccgcgggataaaatatccagattcagtccggtgcagccgtagaggaacttggcgtttgcaaggttcatgttggagcggcataccgttgtaaaatgcagccgcatctcgtctgtgatcggtccgagcgccatcgttcttgtgatgtcggtcgttccctcgaaatagtgtccgccggaatccaccaacaggaagccttccggctttaactcggcatccgattccggagtcgccgcatagtgcatcatggcagcgttcggtccgtaagcgctgatcgtgtcgaagctcaactcaataaagttatcctgctctcttctgcgcgcctccaggtaatccgatgcggagatctctgtcatcgggatcttgccaatgttggtcttcagccagtacatgaacttggtaaatgccacaccgtccttcacatgtgccttgcggatattctccacctcgaccggattcttgaccgctttcatgatctcggtcgggttcggctggtccacaatgcggatctcctttcgcaggctgctggtaatgcggtagttgaccgtattgccattcatcagtacgcatgcgtccgccgggatctctttcacataatcatagattgcatcgtaaggtctggttgtgatgtgattctctttcagatatgctgcaatcttctcatccacaacttcttcctgtaaaaaccagatgcactccttgtcggtaagcaccagataggacaggatgaccggcacgtaatcgatgtctccgccgcggatgtttaacagccatgctatatcgtataaggaagtcagaatatgcacattggctccctctttttccattaccttgcgcagatccgcgatcttgtctgccgtgctcttgccggagtacttctcctcaagcaaaaacagcggttccttagaaagcgccgggcgatccttccagatcagatcaatcagatcctccgtcacgtacaaagaacccttctttttctccgcaatggcgagaagctttctgccccagcttccgttcaccactctgccgtcaaatccgatgcagccgctctccggcagttctttttcaacgaactcatccacggtcggcacaccctcttcacccatgcggtaaagcgtcacggtacttccggcaagctgcttttccgcctgcacgaaatagcgtccgtctgtccacagtcctgcctctgtcagggtaatgaccgccgtgcctgccgatccggtgaaaccggtgataaactttctggctttaaaatgctcccctacatattcggactcatgaaaatcggcggtcggtacaatataaatatcgatcttccgctttttcatctcctcgcgcaatgcgcttaatctttcctgaatcatagtattctccattccggagcgtctatccgctccattttgttctaaatatctgtgtactcaaagaactttgtatcaatctccggataagaccgtttcaacgaaatcggtcttccggaacggttcaaaaagcagtgggaacttgttcctgtagtgcgaagttctcccgtcgccttatccgtcattcggtactccacttccatcttgattccgttatacttggtaatccgcggctcaatgacaaccacatcatcaaaatgaaccatgctgtgatactcgcaggacaccgacagcaccgggctgatgatctccattgcctccatctccttataggagagtccgatctgatccatcagatccatccgcgcctcttccatccatttgatatagttggaatgatgaatgatgcccatctgatccgtctcgtaatacttggcatgatgctcataaggacgaatcttgatctcatccacctgttttccatagacttcgatttccttctctgacatctgaattccttctttccttacaatacatagacaatggcttcgcccggctcattgcctacgcgtacattatcccacatcccatttaaaatttcaatatccgcagagagcgttctaagcttccttccgttcactacgaccggcttttgaacatgtggcaattccttcttttttcttattttatctctaatcttcaaaatattctctgtagtcatcctcattcgagaagagcatgtattctccgtttacatatcccatatagcctgccgctacaacatatcctttcataaaaaatacactcctttcgtcatctgataaaaggagtgtatcgcatcatgtgtccaattctttggacacatcatcctgtatattatctttaacagctttaataagtaatattatcagaatacacttcgggatttcatgtggaaatgcagatggaatattcgttggagaaaaatgtgagcatttcttccggctgaatgtttgcatcggattccgtgtctcttccacgtttggacaatccgacgggtgcatgtccggcacaccggagacaatgggcggactttctggtgtccctaatggcacctcttcacagacaatataaaaccgcgcgaaccgaaactcgccgtcatctgctattgaaaataaggcagatgacgactcagacatcggcttcgcgcggttatgttctgttcagaggtgccaataagggacacacacaaaagtcctacaaattgtcttccgggatgcggacatgacccgcggagtgctccaaacttggaaagacacggatcatcgaagatgcaaacatccggctggttagaaatgccacattttttgaaccgaatttccagctgcattttcatctgaaatcccacggtgtggtcttctgataatattacttatcccccaaaagagttctatgcttattgcggcaatcctcttctgtcatcggtcctttgattccaccacgagaagaatcccgccttcaaacgagatctctgccgtatctgccacgatctcattgctcacgccaagcgaacagaatccccgcaggcaggcgtccgtgaggggatatttaaatcccttcagtgtcagatgctccacacattccgtgtagggaatgagcgacacatacgttccaaactgttcctttctcgcaagcgtcattccacgatcaatcatacggatgcggttatgggcatcgcagatctggatgggaatccccgcctttagtccaattccaagcagttcgatattccccagcacatgatccagccgtgtccctgtcgctcccaaaagcgtgatgcgctctgctccgcgccggattgcaagccggattgcagactcggtatccgtgtcgtccttctccggaatcagcttctggatcgccacgccgggcaatgtcttaaaataagcaagagcctccgttcccacggaatcaaaatccccgacaatcacatccggcacccggtggctgcggtacagatattccattccggcatccgcagcgataacggcatccggcttctcttcctcaaaccatctgtccgcaaaagaatcgtcgatcgttccgcctgaaattattacaaaatgtttcatacgctcccccgcttttctcccgccgttccttaagaatttaaaatatccagaaacatctgggtattttcagcgacatctccgttaaaaacagcgcttcccgccacgatgatgttggcgccggcactcataatctcctccacattagagagattgaccccgccgtccacctcaatgtctgttttcaacccgcgcgcatcaatcattttcttaagatcacgaaccttctgcaaggtatacgggataaacttctgcccgccaaatccagggttcaccgtcataatcagcaccatatccactttttcaagcacatattccaccgtctgcagcggcgtagcaggatttaacgcaacccccgcaagaatcccacgctctttgatggaagcaatcgtgcggtccagatgcttgcagctctctgcgtgcacggtaatcagatcggctccggctccgacaaaatcctcaatatagcgccccggctcctcgatcatcagatgcacgtcgaagatccggtccgtacagggacggatggagcggattaccggaagcccgaaggaaatacttggcacaaacattccgtccatgacatcaatatgtacatactgtgcccctgcctcgtccagttcacggatctgctctcccagtcttgaaaaatctgcggataatatggatggcgacaaacaattcatctctcttacccccttctttttaatatttcttctgttcttttaattcctgatataactgcctgtaattctcataacggagccggctgattttcccggcttccaccgcctcttttaccccgcagtccggctctccgatatgactgcagcccttaaaacggcagtttggctcatactcttcaaattccggataataccaccacagatcttccttttccagccccggaatatccagcgtggaaaatcccggtgtatccataatgtaagtctgctctttgatcggaataatttccgagtggcgggtcgtatggcggcctcgctcaatctttctgctgattgccccggtctccatctggcgctccggctgcagacagttgatgagcgatgacttgcccacacccgagggtcctgccaccgacgtcacctttccttccagccgctcaagcagcacatcgattccccgctgctctctcgccgaggtgtacaccaccggatagccacactgttcgtagacatccgaaaacgcgtgcagctcctccccggtcagaaggtcgcacttgttaaaacagatcgtaaccggcactttctgatattccatcataatcagaaaacggtccagcagattaaaattcggcttcggctttgccgccgcaaaaatcacaagcgcctgatcgatattggcaaccgccggacggatcaaggcattttctctcggaagaatctcctcgatatttccaagcatctgctcctcatccagcacggcaatcgtcacgttatcgcccaccagcggcttgatcttctggttgcggaaaattccttttgccttacattcataaattccggatcccgctacgtgaacgtagtagaatccggaaattccttttacaatctttccctgcatattcttatccattatgattccggtgtaaactggtaggtgctcgtggtctgatcgttgatcttgttgccgtttaaatccagccatgagattaccaaatagccctcttttgcaagcagtcccgtcttgctgatggaaaaatcatctgtgatcgccttatcccactgtcccagcacattgccggaagtatcatacagcgtgattgttgcgccggatacgttggacgtatcagccggcagattgatcgtcgccttgaagctgtaggttgtcgctgtcacactctgggacggtgacggccccatgcttaccgtgatcgtaatgtcgctgcctttttccacctgcttgcccggatcaatgctctgatccatgacaatgccttccggaagcgtatcgctgtacgctgtctttaccgatacgttgaaatcggtgagcagtgctctcgcctgctcctcggacttgtaggtcgtcttcacatccgggacggtcactgcctctgcaccctgactgatgacaatcgtgatcgtatcacctgtttttgccttatctcctgcggacggtgtctgggaaatgacttttccctcctccacactgtcatcgtaagcatatgtcttgttcggcttaaagccttccttttccagtgcggacactgcatcatcctccgagtctccggttacattcggcactgccacactgccttttccgttgctgatcacaacgccgatcgtcgtgccctcttcgacttccttgccgctctccgggtcctgattggcgatctcgccctcatcgtagtcgtcagaggatacttcgcccttattctccagctttaatcccttcttctccgcctcggtctgcgcatccgcatatgtcatgccgcggaaatccggaacggtaaccgtatcctcgttctggctctcggtctgtgtagtctctgtgcgcgacgtctccgtgtcagactgcttcttggacttgattccgccgaacagatttaccacaatcacaatgatgataatcacaatcacgactgccgcaacaattcccatgatcgtgatcgctttctccatcttcggattcagatcgccgtcatcctcgtcatccagctcatcatcgtccacatcttcttcgtcgtcctcatcctcatcgtagcggttcatctcctccgctctcgcgtgcaccgcctgatccgccttaagatagaggctgtctgcctcctccttgatctgctttaagtcatcctctccgataatgcgtgtcttgtcctggttggttgcaggaaccatcacgacaaaatcctcattcgggctgacaagcgccttgcgcagatccgtcaaaagtgccgtcatggactcataacggcggtccggattcttctgcgtacattttaaaatgatcttctccatactgatcggaagattcggcgcgtaggcactcggcggaacaatctcctcctgcagatgctggatggcaactgccacggtcgtatccccgtcaaacggcacacgtcccgtcaccatctcatacatcacaataccgagggaatagatatcgctcttgccgtccacaaatccgttgcgtgcctgctccggagaagaatagtgcacggatcccatcacatcggaactgatcgtgttgctgcttgctgcgcgcgcgataccgaaatctgttacttttacttttccttctgtggaaataataatattctgtggcttaatgtcccggtggatgatacccttgctatgcgccgcctcaatacctcttcccacctgaatggcaatgctgactgcctccttaaaagaaagctgaccctttttctcaatatatgtctttaacgtgatgccttccacatactccatcacgatataatgcattcctttttcgcttccgacatcgtagatatttacgatgttcggatgctctaatcccgcagcagactgtgcctcagtgcggaactttgtcacaaaattcagatcctccgaaaactccggctttaaaaccttgattgccacaaaacgtccgagcgtcagatcttttgccttatatacgtcagacattccgccggcaccaattttccctatgatttcataacggtccgctatatacattccctctgttaacatattaaacctccaacctgatttacaaagaacttcattctctatctagtctcatctgaaaacggctcaatcaaaaccaccgttatattatccttaccgccattctcgttcgcggcgtcgatcagccgttgtgttttctccacaatatcacgctgtcccagcacgatccgcttgatatccgtatcatcgaccatattggtcagaccgtccgaacacaacagaaccgtatctcccggcacaagcaccgtctcgaagaaatccgccgacacctccggaagcacgccgatcgctctcgtaataatatttttatccgggtgcacttttgcatcctctttgtccatctctcccagccgaaccatctcttctaccagagagtgatctcttgtaatctgtgtgatacgttcctggttgatcacatacaaccggctgtcgccgacattcgccgtgtagagcttatcgccaaccacgactgccgcaacaatcgtcgtgcccatgcccgctttgctcgcatccgcgttcgcctccgcaagcaaatgttcatttgcatatctgactgcctcaccgagcacggtcaccggctcgctctcctcggattctgttacgtattccacaatcttttcaactgtgaagcgcgaagcataatctccagccgcatggcctcccataccgtctgctaccagaaataaatccggaagccttcccacggaggtctctgatgtgtacatataatcctggttcgtctcacgccgctgtcccacatgcgtcatggaaaacgtcttcattctattcctccattattagaatagcagtacctgcctgccatttatccaattaccaatgttagcatacaacgcgaaaaagggcaagacttactactcctgcccgacaccccccgtctcctgcccggtatgctccatttcctgctctttgtgcatatgcttgcgtctcagctgcccgcatgcaccgtcaatatccctgcccatctcccggcgcacggtcacggtgagcccgtttctctccagctttttctggaatgcatgcactgcaccgtcatccggctgtctatagctgcgttccttgatcggattgaccggaatcagattgatgtgacagttgatcccgcgcacaagctctgccagctctgcggcatcctccgccgtatcgtttacgcccgccaccagactgtactcaaacgtgatgcgccggccggtctgttcaaaatagtaacggcaggcatcgaccgcttccttaatgtcatatttgttcgccacaggcatcagctgcaggcgcttttcctggttggatgcatgaagcgagagcgccagcgtgatctgcagctttttatccgcaagctcccgcatgcgcggaacgatcccgcaggtggagaccgtcaggttccgctggctgatattgagtccgttttcatcgctcagcagttcgatgaattttaacaggttgtcataattatccaaaggctcgccggttcccatcaccacaacattggagatccgctcgccgatgtccgttccgatctgatagatctgatcgagcatctcggacggccgcagaccgcgcaccagaccatccagcgtggaggcgcagaaacggcagcccatccggcagccgacctgcgaggaaatacagacggagttcccgtgcttataacgcattaagacactctcgatgacattgccgtcgtccagaagaaacaggtactttctggtaccgtcaatcttcgagatctgcacatccgccttttttaagctggtcagcgtacagttctgattcaatttttcaatgagagccgcagaaatattggtcatctccgaaaaggatgccacatgctttctgtgcatccactcgtaaatctgttttgcccggaactttttttctccgatcgactcgacaaatgcggtcagttcttccagattcaacgatttaatgtctgtcttttccattccttatccgttgtcctgctttcgcttaaattttgctataaaaaatccgtccccgagatgttcttccgggaacatctgccgcatcgtatcgagggtgaactccgggtgcgtctgctcaaaccatctggcattcccctcgttctccgccgtgtgaatcgtgcaggtggaataaatcaatgtcccgcccggcttcacatattcacacaccacagacagcatctgcctctgcaatgctacaagcgattcctccccttccgggttcatgcggtacttgatatcggtctttctgcgcagcaccccgagtcccgagcagggaagatccgcaatcagcacatccgccgtgcgaaccgatgcctcgtccaaaacagtcgcatcctgacacttcgccgtgatattcgtaagccggcatctttttatattctcatcgatcagcgccactttctgttcgctgacgtcccgcgcctccacatgaccggtacctcttaacttttccgcaagatgaatgctcttgccgcccggcgccgcacacacgtcaatgcagtggtcgccctccttgggcgccgcatattctgccaccatcatggagctgatgtcctgcacatagaacagtccttcctgaaaactggaaagaccgtttaaatgatcaaacccaaagatcgtaaatgcatacgaaagtccgggatatttttccgtatccagaggaaccgcagtaacgccctcctccttaaaacgctctgcgagcacctccggcgtgatccgttccagattcgtgcggacggtgatcggcgcttccaaaagggacgctgcaagaatctcttttgtgcgttcctttccgtagtcaccaatccactgcgcaacgatccattccggcatcgagtagcacaccgaccaggcttttacggcatcggcgctctcctctggatatgtaagctgatccaggctgcgcgaaacaccgcgcagtaccccgttcacgaaaccggacagctgtccgaagccctttttcttcgcaagctttaccgcctcgttgcaggcggcggatgccggtacactgtccatatatttcagctggtatacgcccatcctgagaatggcgcggatcaccggcttcatttttctgacctttacttttgagaactgatccagaatatagtccagctcaatctggcgctgaatggtgccctccgccactctcgttaaaaatgcgcgctctcttttgtccagatactggtacttatccagcaccgagcggatcaccagatggctgtactgtcccttctccgtcacttctaaaaggatctcaagaatcagttcacgcgtattcacggaatcagtcgtcacgtcttcttcctccaaataataacaccagacgaagcagctgcagaatcgatgccgccgcactcgccacgtaagtaagcgccgccgccttcaacacttttcgcgtataaggcagctcactgtcgcttaagattccctgctctcctaaaatgcgcagcgcgcggtgtgatgcgttgaactccaccggaagcgtcacaagctgaaacagaacagcgaacgaaaaacaaagaattccaaggtcaatcaaaaatgcccccgtattgctggtaaaaaataatccgattaaaattaacggccatgccagcgtagaaccgatatttgccaccggcacgatcgccgagcgcagcgcaagcggcacatatccctgctgatgctgaatggcatgtccgcactcatgcgccgccacaccgacagccgccaccgatgtacttccatacacggaatccgacagattcagcgtcttgttcgacggattgtagtgatcggtcagattgcccgatacatgctgcaccgacacatcgtagattcctgccgagtgcagaatccgttccgccgcctgtgctccggtcatgccggacatgctgcggtaagatgcatacttgttgtatgtcgacttcacccgtgcagatgcgaccagacagatgactgctccgatgagcacgagtatataggtcggatcaaatccccagtaatagtatgaatatggcatagtaatcaccctttcttaaaatatgtgccctcttcaatctcatatccgttcagaaatgcctccaccggcatgcgcttcttgccctcaagctgaagctcactgatggcaagcattccctttccggtctgcaccagaatatgatctttttccactttcacgatgcagcccggctccgccccggactcctcaggaacgaccttcgccttccagatctttaacatcttatcgcccagtctggtgtaggcgctcggccacggatccagcccgcggattaagcactcaatctctttggcgccctgtttccagtcaatgcttcccagttccttataaatcttggcggtatgtgttgcctgtgagttatcctgcggcgtgtaggttgccgttcccgcctcgatcgcctccatcgtgcgcacgcacagcttcgcgccgacctcggccagccggtcgaacaggctgccgcccgtctcatcctcgcggatcccgacttcttcctttaagatcatatctccggtatcaagtccctcatccatacgcatcgtcgtcactccggtgacggtgtcgccgttgatgaccgcccactgaatcggcgcggcaccacgatacttcggaagcagcgatgcgtgcacattcacacacccgtagcgcggcatatccagaatcgctctcggtataatctgcccaaaagcctccacaattatgatatccggatgatatgtccgcagacgctcgatacactcgctgtctctgactttctgcggctgatatacttcaatgccatgctcaagcgcgcatgccttgaccggtgtatagcggagcgccttgcttcttcccaccgccttatccggctgggagacaaccagtaccacctcatgtcccgcttttatgatttcttccaacgttcccaccgcgaaatccggtgttcccatgaatatgactctcatcactgacctccattttcacagatcatccctgctttattcttcctcatcactctcataggtgacttcgtgaagcggaccttccaccttctcagtgtacatgtgtccgtccagatgatccagctcatgacagatggcacgcgccatcagctctgtcccctcaatctcatactcttccatatccagatcaaacgcccgcgctttcacgtagttcggcctggtcacggtgcctgccttgcccggaaggctcagacagccctcgtcgccggtctgctcgccggaagtctccaagatcaccgggttgatcatcacaaccggtccctcgccgatgtcgatgacgacgatgcgctttaacacgccgacctgcggacctgcaagtcccacgccgttcgcctcgtacatcgtatcaagcatatcctctgccagttctctgatcttcggtgtaatctctgtaatctctctgcattttttggtcaatacaggatctccctgtattctgattgtcctaagtgccatctttcctccattctgcctaaaagccgttcaccggattgaaatcaaacatcacagtcacattcttgtagtaccggctctctctggcatacacttctgtcctattttttatctttaccagcgtgtcataattttctgccttgagataaattatttttttataaatatcattcacttttgcgatcgccgcgtcgacgggtcccacgagatagaccttctctttcgtattcttccctgtatacgcatccgctgccgccgcaagctctgccgccatggcatccgccgcctcctcgctcttagaggcgcacaagatcacaagcatgttccagaccggcgggtaaagcatgatcttgcggtacgcaatctcctgctcgtaaaacgcatcgtagtcctgcgccttcgccgtctctatactgtaatgctccgggtcatacgtctggatgacgacctcgcccggcttattcccgcggccggctcttcctgccgcctgtgtcagaagctggaatgtccgctccgccgcgcggtagtccccgacatgcagcgagagatctgctgcaagaacgccaaccagcgtcacatccgggaaatcatgcccctttacgatcatctgcgtaccgatcaggatatccgcctcgtgattggcaaatgccgataaaatctgctcgtagtcttccttgccccgcgtggtatccatatccatgcgcagcacgcgcgcttccggaaatcgttttctgacaaccatctcgatcttctcagttccagccttaaacccgctgatgtacttcgatccgcacgccggacattgtaccggcaccggctccgtatacccgcagtaatggcagaccatccgcccgttcgcatgctggctcagcgatacatcgcaatgcggacattttatcacatgtccgcaggctctgcaagagacaaagcccgccacacccctgcggttgataaagagcatggtctgttctcccgcccgcaggcgctgctccatcagcccgtctaacctgcggcttaagatggagcggttgccctctcttaattcctgccgcagatccaccaccccacatgccggaagcggtctttccttcacgcgctttgtgagcgtaagcagccggtattccccgcgctttgcacggtagtaactgtccaccgacggcgttgccgatcccagcacgacgctcgcgtcaagcatggcagcccgcgcgatggcggtctccctggcatgatagcgtggaaccgtctcactcttataggaagtctcatgctcctcgtcaatgatgataagccccagattggcaaacggtgtaaacagtgctgacctcggaccgatcatcacgtcgatctccccgttttttgtcctaaggaactgatcgtagcgctcccccggtgacattctggaattcagtatggatacccggtcgccaaaccggttatagaaccgcagcaccgtctgatacgtcagcgcaatctccggaatcaggacgatggcctgccgccccgccttctgcatcttcgcgatcagttccatatagacttcggtcttgccgctgcccgtcacaccctttatcagataggtcgaccggattcccttctcgtaatccgaccagaccgcatccaccgcttcctgctgctcatcgtttaaagtgagcccatatcctctgctggtcaggtgggacaccggattgcggtactgcgtttcccgaattactttgacgacgccggattcctccatcgcccggatcacacttcccgacaccccaagcttgtgtgtgacaagatcccagtccagctcctcctcttccagcagcgcacgaagcagcttggcgcgggcggtgctgtggcgtctctcatacgctcccagctggttcttcgcctccaccggatgaagcgcaagccgcacccttttatgttccacggcttttttcttctccttgatcggaagtaccatctttagcgcctggttcatcgtgccgccgtaatgttcccgcatccagcccgcaagcgcgatcagatgggactcaatcggcacactgtccgtcacgatccccgcaatatttttcagcttatcctcgtcatactccgcctcatcggaaagttcgaccacatagccggtgatcctgcggctgccgaacggaatatagacctgcattccgactgcgatccgctgtgtgagatacggcggaatgcggtactcaaatgtcttatccagtttttcctgtgaaatatccacaatcaccttcgcatattccgccatctgtccacctcgcttctatctgtattctcccccatgccagggcttcgtctcgcctcctccaccagctcgtattcactgagcggatagcgtaccccgcaaatctcctgatatgcctcgtgcccttttcccgcaagcacaagcatgtcattctccatggcatgcgccatggcataccgcacagcttcccggcggtccgcaatgcgcacatactgaccgccggttccccgtatcccgtcctcaatgtcgtccagaatctcctccgggtcttcccagcgcgggttgtcggaagtcagtatcgtaaaatccgccagatgtcccgccgtctctcccatcttcgaccgcctgagcttcgaccggttgccgccgcacccgaacagtacgataagacgccgcggcttaaaaccgcgcagcatttccagaagattttttaagctcatctcattgtgtgcatagtcaatcagaatggcataatcttcggactgcctcacgttctcgcatcttccggggacttttgcgctgcggagtgcaaggcagatatcgctctccgcggctcccaggtgtcctgccgcctttatggccgccagtgcattgtagacgttaaacgttccggggagctgcattctcaccggatacaccgccgtcttcccgcgcaccagaaagcttccccaaagttctcccgactgcataaaaaagcggatattctccgccgtcacatccgccggatgccgcagggaaaacgtctccacgctgcaggtatgtccctgtagtatgcgctccgtgtgcggatcgtcccgattgacaatcccgatccggcactggcgcatcaggcggctcttgcagaacagatattccgcaaacgaagcatgctcgccctccccgatgtgatccggctcgatgtttaagaacatgccgatgtcaaaaaatatcccctccacccgctgcatcttcagcccctgggaagagacctccatcacgcaggtatcacagccgttgtccaccatctgcgccagatacttctgtatctcgtaggcttccggcgtcgtatgtaccgccggaagaacgccgtctccggtatcgattgcgatcgttccgatcattccggtcttatgcccgctctctcgaagaatggcagaaagcagatacgccgtcgttgtcttccccttggttcccgtaattccaaccatacgaagctttgccgccggataatcaaaaaaagctgccgcaagctctgcgagcgcgtgtctggtatccgccgcaatcacaacggagacctgccaccggtctatgatctccgcgatccgcacaccaaactgttccgtgtacaaaagcgcatcattgtccagcggaaccacattctccgccgcaaccacaactgctgccgccccggcctccagcgctccctgcagatagtcatgcccgtcgttatgtagcccttttaggcaaacaaatagggagccttccctgacattcccggaatggtaacagatgtctgttatctcacggctctggcttccctgcacatgttcatatgtaagatgtttcaataattgattcagccgcatgtcatcctctgccgaattcactttttttattatatgccagatcttaaggttttacaagttatcccgatttatttcattttaatttcagaaaatgtacatattttgtcaggaaccggaaatactgaaacacaaacgaaaaccggaggaatctctcatatgcgcggacgtaattttctcatctgcggactgaccggctggtgcatggaaattctgttcacctccgcaggctccctcgcaagacacgacggccgtctgatcggtcagacctccctgtggatgttccccatctacggtatggctgcctgtatcggtccggtctatgcaaaaatcaaaaagctgccggcacttctgcgcggcagcatctatacagtgggtattttttcattcgagtacttaagcggttctctcttaaggcggcatcatttctgcccctgggactacagcagcgccagggcaaatgtcaacgggctgatccggctggattatgccccgctgtggctcggcgcgggtctgctctttgagcgcattctcgtgcacgcaaaccggctcacatagccagaccgcgcatggcgccctttcccggcacgcactcctgcgccctgtaaaagcagcggcttttcctacagatccacatcatctgcaatgcctgcaccgatgtcctgcatgtttaatgtgcgtctcttgatgcgcgccgcctcggatgccttcagaagataattcttaatctcctttgcatgcttgatatgactcaggcgaagttccttgtctgtcacgtctccggtgtagcagatgatcgttcccatcccgaaaatccgctccggcagtgtggctgtcagcttgacatcctgcactttgtacatgtagcagtcattctcttccaccttgatcaatccctcatcgacggtaatcatatcctgactgatcgtatatttggtaaatgtccatggaagtccaaagaaaagtaaccgtttgcgctcctgatactttacctcctccgcttctccctgactaaaatttgtctcttctgccatgtctgttcttcctttccttgtatgttccgccccaggcgaaactttttgcattcttttctgcgtacctgtagtttacttcatttttctttttcgcgcaaccaaatatcagaaaacggctccaatcttttgaaatatcacacaaaaagtccgccattttgcgattcgtgcgtaaatatttttccccttgaattcgcagagtgattattatatgatagaaaaaatgcctggagacagacagatttgttctgccgtttccggtcaatacaaggaggattttatgcgtcatttaatgagcccattggacttctccgtcgatgagttggacaagcttttggatcttgccaacgatatcgagaagtacccacagaagtatgcccatgcatgcgaagggaaaaagctggcaacctgtttttatgagccaagcacccgtaccagattaagttttgaagctgccatgttaaatctcggcggttctgttttaggtttcgccagtgctgattccagttcggcagccaaaggtgaaagtgtttccgataccattcgtattatttcctgctatgcagatatctgtgctatgcgtcatccaaaggaaggtgcacctcttgttgcctcccagaaatcccgaattcccgttatcaatgccggcgacggcggtcatcagcatcccacccagactcttaccgatctgttaaccatccgttctttaaaaggacgccttggcaatctcacgatcggactctgcggcgacttaaagttcgggcgcaccgtacattctttgatctctgcactgatccgctatccgggcatccgtttcgtgctgatctccccggaagagcttagaatcccaagctacatccgcgaggatgtccttgcagcgaacaatatcccgttcaccgaggtggaacgtctggaagacgccatgccggatctggatgttttatacatgacccgtgtacagaaggaacgcttcttcaacgaggaagactacgtccgcttaaagaatttctacattctgaccaaagcgaagatggatctcgccaaggaggatatgctggtgcttcatccgcttccgagagtcaacgagatctccgtcgaggtcgacgacgacccgagagccgcctacttcaggcaggcacagtacggcgtctatgtccgcatggcgctgatcctaacactcttagacatcagggtcgattaaataaaatcggcagaaaggacagatacatgttaaatatcagtggaatccacgagggttttgtattagaccatatcaaagccggtatgagcctgcagatctaccacgacctgaagctcgacgggctcgactgcacggttgccatcatcaaaaacgcgaagagcagcaaaatgggcaagaaggatatcttgaaggtggaatgcccggtcgaagcgctggatctcgacatcctcggcttcatcgatcacaatatcacagtcaacgtcatcaaggacgacaagatctatgagaaaaaggagctgcatcttccaaagcaggtcaagaatgtcatcacctgcaggaatccgcgctgtatcacttccatcgagcaggaactcgaccagatcttcctcctgaccgatgaggaaaaggaagtctaccgctgcaagtattgtgaagaaaaataccggaatccaaaccgcagatagatcctcggaagcctatgcctgctgctacggcaggcataacgctctcccagcagtaatatatgatgccggcagctgcaacaggcatagcgcttttccggcaacaaaaaacgcgcacccgcttttgcaggctgcgcgtttttcattgccccttaagccgtatggcatccggcagcatttacaacaattcctttaagatctggttcaccagtgcaggatttgcttttcccttcatcgctttcatcgtctgtccgaccagaaagccgatcgctttttcttttccgttgtggtaatcttccaccgactgtggattctccgcaatgactttcgccaccgtctcacggagtgctccctcatcattgactgtcaaaagcctcttttccttcacataagcttccggatcgatgtcctctttaaagactttctcaaagacttcctttgccacggtgttggtgacggaacctgcatccgcaagatccaccagctttgcaagatgttccggtgaaaagcggatctgatccgggtccatctcattttcttttaacaggcggatcgtctccgtcatgatccagttggagacttttttcggttttccgcagatcgcggccgctgcctcaaacagatctgcaaacgatttgtctccggtcaggatctccgcgtcgtatttcggcagaccgaactcctcctgatagcggatcagcttctcatccctcatctccggctggcgtgccttcacgcgctcgatccactcgtcactgatgaccaccggcaccagatccggctccgggaagtaacggtagtcctgtgcgtcctccttggatcgcatcgcgtgggaggattccttgttgtcatcccagcggcgggtctcctggacgacctttttcccctcctcgatcagttcgatctgacgggcgcgctcaccctcgatagctctcgcaatcgccttgaaggagttcaggttcttcatttcggtacgtgttccgaactcagcggctcccgcctccctgactgacaggttgacgtcggcacgcatggaaccttcgtttaatttgcagtccgatgcgccgagatactggatgatcagcctcaatttttccagataggcaatgacctcctccgcagagcgcatatccggttccgacacgatctcgatcagcggaacgccggaacggttgtaatccacgatggacacgtcctcccactcgtcgtgcaccagttttcccgcatcttcctccatatggatctcgtgaatgccgatcgtctttttgccggcagccgtctcgatctccacgccgccgttgcggcagatcggcagatacagctgggaaatctgatagttctgcggattatccgggtaaaaatagttcttgcggtcaaatttacaatactgggtgatcgtgcaattcgtcgcaagtccaactgccatcgcatattccaccacctgcttgttcaataccggaagggatcccggcatgccggtgcacaccgggcaggtgtggctgttgggcgctccgccaaaggctgtcgagcagccgcagaaaatttttgtctttgtcgctaattctacatggacttccagtccgattacggtttcgtatgttttgctcatctatctcatcctcccactgtcatcgtgccaacggactgtgttcgtagcttctggtctgctcgtaagtgtatgctgcgcggatgatttttttctccgcgaagcaatcgccgatgagctgtaaaccgatcgggagtccgctctgatccgttccgcatggaagcgtaattcccggaagtcccgcaaggttcacggaaatcgtatagatgtcgcccagatacattttcagcggatcactcaaggacgcgccgagcttcggtgccgtcgtcggtgccgccggtcccaggatcacgtcatatttttcaaatgccttgtcaaacgcctgcttgatcagcgccttcgtgcggagtgcctttaaatagtaggcgtcataataaccgctgctcagcacgaaagatcccagcatgatacgtcgcttcgcttccgcgccgaatccttcggagcgggtctttttgtacatattgtgaagcccgtcatactgctctgtgcgataaccatatttgacaccgtcaaaacgtgccaggttggagctcgcctccgcgcaggcgatgacatagtaagccgggattgcatactcgaccagacttaaatcaaactcctccacaatcgcacctttctcctccagcttctttgccgcgccaagaaccgccgcctttacctccgggtccagtccgtcgccgaaatagtctctcgggataccgatcttcatcccacgcacatcatccacaagcgccgttgtaaaatcatagtcctcgcgctgcaccgatgtggaatctttgacgtcatgtgatgcgatcgcctctaagatcgtcgcgcagtcggtcacatccttggcgatcggtccgatctgatccagggaggaaccgtaggcaatcagtccgtaccgggataccgttccgtaagtcggcttgatgccggtcacgccacagaaggagctcggctgacggatcgagccgccggtgtcggaaccgagcgcatagctgcactcttccgctgcaaccgccgcgcaggaaccacccgacgaaccgcccggcacatgcccggtgttccacggattttttgtcacaccgtacgccgaggtctcggtcgtgcttcccatggcgaactcatccatgttcgtcttgccgaggatgaccgctcctgccttttccagattcagaaccgcctccgctgtgtacgtcgggacaaaattgtataaaattttggaagaacaggtcgtaagcaatcccttcgtgcacatgttatccttgatcgctaccggcacacccgcaagcggtccggtcagttctcccgcatcaatcttcgcctgcacttcctttgcacgctttaaggcgccctctctgtccaccgtcacaaagctgtgcacctctgcctcacgcttctcaatcgcatctaacgccgccgtcactgcctcctcgacggtcacttctttttcttttatctttctgccgagttccacggcagtcaaactcatcaaactcatctgttttcctcactttccctctttcatgtacatgcacgctctcccatgccctgccctatgaaatcgtcttcggaaccttaaagccgccgtcttttttcaccggagcgttcgcaagtgtgtctgcacttccgtcgccgtttgtcaccacgtcctcccggaatacattattcaccgggaatacatgcgacatcggttccacgccctccgtgtcaagttcgttgagtttgtcaatgtaatcgagcatctcacccatatcctttttcgcctgctctttttcttcttcacttaactccagcttcgcaaggattccgacatactcgatcgtctcatcggaaatcacgttcttcggtgtgtgtccggtctgttctccctgctgttttccctctgtctgcgcactatccactgctttttgtgccgcaccctctgtctgcgcgtccactgtcagctgtaccgcatttccatcgcccacatatgtcaccatgccatacaaagcgcagtcgcagataccggtattgttccagtctgcacggattctggtgccttcgtagcgcataccgcagtttttcatgacctcgccggaatacgggttcttcggatcatgtctggactccaggcgcaatacgccgacctcctcaaacagataacgcatgacctcggcaagtgcctccgtggtaatgcctttgtgccagcggctcctgctgatgcaatatccgatctcgcaggactgtgctttttcattgcggctcacaacaccgatactgccgaccggctctccgctctccttctcctcgatacaccactggtatacctccggattgtcataggcagccacccactcttttaaaatctgtctgctggtctctgcgctctcgtgcgtcggccaggtcagaaactttgtgacctcgggatcgcccgcccagttttcatacattttttgcgcatcttctaatgtaaaacgtctcaaaatcagccgcgctgtctcaagccgttttgttcccaaatctttcactgtcattctcctctctgcatcccgtgcgtcccgccgaaacgctccctcacttttgcattcagctttttgtatactctctcaatcatccacggctcactgcacgccgcgagcgcctcctccagtgaaaaccaccgcacaccgctgttctcgtccggcttgatgcgaagcacttcggcttcatccgcctccagaagatacgtcacattcagatgcagatgcgacggcacatagactccacgcttctcatgcccgtcgaccgtcagaatctcaagcgaaaagatgtcttccgaaatcacccggatttctgtcacgccggtctcctccatcgcctcgcgcttcgcaaccgccaaaaggtctctgtctccgtccgcatgaccgcccgtccacgcccacgagtgataaatgttgtggtagatcatcagcaccttgtcatgtgtggcatttaacagccacgatgacgctgtcatatgcgctacctgattctcccttgtaaataaatccggctgtgtggcgaaaagctgccgcatcactgcctgatcgtgtgcttcctgctcattgtacggcttgtagtctgcaatctgttcttctatgttcatgtgtgtttccttttcctgctgttattttaagccgctttgttctttgggtcttgtctgcggctccaggcggcttagaatccaaatggaatttaaggctcgttgttctctttgtatttttctacggttccaagcggcttaaatctcttgggaacagggttgtctcgcggacattgtcctcgccgaccagcttcatggtcaggcgctcaagtccgattcccagtccgccgtgcggcggcataccgtatttgaataccgccagatactgctccatgccctcggtcgtcatgccgcgcttctcgatcttatccagcagcatctggtaatcgtgaattctctgaccgcctgtcgtgatctccagtccgtgatacaacaggtcaaagctcaacgtgtatgtcggatctgttggatcgtccatcgcataaaacggacgttttttcgacgggtaatgtgtcacaaacacaaaatccgcaccacactcttccttataatattgtccaatcagcgcttcctcctccggctcaagatcgtaagggtttctgatctggcggtgatatttttccgccactttctgtttcgcctcatcaaagcggaccgccgggatctgctccacattcggaagcgtcacgccaagcatttttaattccttcgcgtaatcccgctccaaaagcttcatggtatattgtaaaaatccggtttccatcgccatgatgccctcgaatccgtcgatgtatcccatctcaaagtcaaggctggtatattcgttcagatgacgcttggtattgtgcttttccgcccggaacaccggcgcggtctcaaagacccggtcgaacacacccaccatcatctgcttgtaaaactgcgggctctgctgcaacactgccggtctgtgaaaatactccagccggaacagatttgcaccgccctcggcgcttttcgccccgatcttcggtgtgtgaatctccgtaaaaccttcgctgtacagaaaatcacggaatcctctgaccacgccctcctggatgcggaacttcgcccgctctctgacgttgcgcagcgcgatcgcacggtgatccagattcgtctccaacgtcgtcggcagtttccacttggaaatcgcaaacggaagctgcgccgccggttccgacaacacgcagatcgtatccagacgtacctcaaatccgttcggcgcgcggtgctccgcccgcacggttccctccacctcgatggtcgacgcttccttcagttcttttaaatcgaactttgtttttccctcttcaaatacgcactgcagtaatccctctctcttgcgcaggatcacaaatgcaacctcacccatatcgcggatggtgtggacggcgccattcacttttacctgttttccctcaaaatccccggaaaggatttcactgatttccaccgtttcttttttgctcactcctgttacatattccatattgtacgctccttttcgtccggtgctgccggattgatctaggtgcgggacgggattcctttcgtgcatcggttgctttttcaaaaatcatgtgtacatttgccgcacacttataccagccttggctggctgtccgatgcggtatgcagagcactctctgcctttccgcaagatgcatatcccgcctgtcagggcttctgctctataggacacactgttttctcatttaacctgatgcaatatttcctatagaccaagaaagaatcctgctttgcaggattctccgcctgcggcgggttgctccagcgacataaaattctactccgacgcagtgcgctcctgcccggagggctttttcattcataggacgtaatttcctatgaatgaaaaaagccccggaaagacaaactgtctttccggggcgggatcttcttctgcaacttctgcttgtattcccgcggtaccacccgctttgaaaaatgattcgtaaaaatcattcttccactctttgtgcttaacgcgcaccaacgtactgacctactttaccgctgccgtcccactcttacttctacccgcaggataaccacctgttcgaccagtctgctccagagtgttcccgttatctactctcccaaacagcgctctcagtcggtgacgctgtattcctgtcgatgtctgaagataagagtctccttcatagcctttcatgctttaacaatttaatgttgtaacatttataccacatcattctggggttttcaagatattttttcaaatattttgtaaaatatgtgcggcacggtgcattgccggcatcttctctatattgcgcctttttcttttaagtacgccagaaatccctcgcatccggcatccacatcccggtaggtatcatcaaaattaccgctgtaccaggggtctgcgatcgagcaacccggtctgtccgtgtaatctaacaacagccggatcttgccctccgtatctgctcccgtaatcctgatcgtattgcggatattcgcagtatctgcacagagcagatagtcataatgctcatagtcttccctggtcacctgtctggcgcgcttgccgctaaaatccgtgtacgccgtcccgccaattccccgccgtcttaattctgcctgcgccggcggatagatcggattgccttttccgttccagatctcttctgtggaggtggcggcggaagcaatctcgaagcgggaggtgagatgccgcttttcgactttgtcttttaagatgaactctgccatgggggaacggcagatattgccgtggcagataaataatactctaatcatctttttatatctccatttaagtcttgtatttcttctcaaacgcttgatatttcagggttttccgacttttgagttttcctttcttttcaaggtatcttctcaaatcttctcatattttcttatgtttttccctgcaatcttggtaaatccattggtaaagcaagcgtccttaccaacgggcttttttaactattcgctatccgatatacttcttcctttgcatcatcaaaattcacatgggtgtaagtgttcaaggttacactgatgtctgcgtgacccatgatatactgcaaggttttcggattcatcccggattttgccatattagagcaaaaggtgtgcctgcatacatgaggggtaactttcggcatttggatacggtaaatcctgttgtatttctgaatgatatgctccagatacttttcccagtgaagggcaaccatcggcatatcgtttttatccagaaacaaaaatcctgcatatccttccaccatcggttcaacttttggtgtcttgcggttggcaatgattctgcgaaaacacgctgcgacagcttccgtcatcggcacatagcggatgcctttgtcagtttttggttcttcaattacatactgcatctgtgcagtacgctgtaactgatggtctaccttgatacgcatttctccaaactcgatttctgaaaccgtcagtccacagaactctgagatacgaagccctgtgtgaaaaagaatatagattgcatcatagtatctgctaaaatgtttatcttcttgaataaacttcagcaaatctctctgctgctttcgggtaatcgcttctctggtaacagaatcattaacaatgacggatgcaagctcaaattcaaatggatttttgcgaagcaggtcatcatctactgccatctgaaatgctggtctgagaactccccggatcgaatgaatggaactgtatcctcgtccatcaatttgttggagcttaatcaaccatgcctttgcgtctgacaaacgcaccttatcaattcgcagattcccaaaactctcttttttcagcatattgatgaccgttttatatccggcaaccgtattgtgacgaactcctgttttcaatgaaacatacttttctaccagttccaaaacagtatagttgccaccgttggttacgatacggtcaaacaaatccgcttcaatctgtttttctttctcacgcagggaagactcccgcttcttcccttttggcattgggtcattcttgtccaaacgccaactgtatacatttttctcttttccgtcctcatcaatatagcggaaccgatacctcccatctttacgctggtactcgccctctcgcaaaatccgattacggttatctcgtcttttctcactcatcgtgaactctcctttcaaaaaagagagccagacttgcgctcttatcatagcacaaatccagctctccgcatagttatatcatgtgaaatcggtaaatctgtcagctctgtttacacagcagtagcctgatccagatacctctcaaatttctcacgcttaatgagggcacgattgccgttcatcacataaaaatcctcattgggatgtgtgtcaataagcgttctcaattttccttcgccgatatgataatatctggctgcttcctcaatggtaagcgtatatctacgccacaccggaacatccgagtaattttttccttcaatattcatcttattattcgccataggcagttatcctccatacatgaaaatagccagacagagggtgtcggcaacgaagtccggcaacgggcttcaaaagaccttgcaaacaatctcaatctggcactacttactatttatacttttcttttatttttctgttgttttggttgttataagggagaaaagctgatagtttcggggttttccccggcaaccggctcggcaacgggatagcaacaggggatgcaacgggctgtcattttcagaatggaagctccatctgttctgtgacctccacaaaaccgtccatcgttttttcagacgggttgccggagtccgttgccgggttttcacgctcccagcccttttgtctgccatattcggaaaacattcttggattcgggaagtaccgccagccagtaatgcactggttcataatctcgttgatttcccggatttcccattgcttcggctcgtcaaaggcatggttcaaggcttccttgtagagctgcttggagcagaccatgttcccggtgtacttatcaagatacgcctgtatcattccggctttggtgtcctccggcataaaatcccgctggtgttctttgagataccgctgcatggcagggctgaaagccagcttnnnnnnnnnnggtaaatctccatcgcttccgcccacatctgctcgatataggctctggaagcagcttcgtcctccaaaatgtgaacctcggcttgctccgggtacaccatgacagggataaagcggcggttgccggaacggtcaaggggcaggaagtcaagggcattggaagtgccgccaaacacgcactgacgggggcggtctgccgggtgggtttcatagggtatcttgtagacctctttctgccggcttaaaaatgacttgatttcctcaatgctcttggcattggcggttgccatcatttctgacatttcaataatccagtgaccttgcagcttgcggtacacattgtcatcgtccagcttccgcaaatcatcggagaaccactcatcccggactgccagcagacggaagaaggtggacttgccagccccctgacctccaaccagacagagcatgatttcaaacttgcaccccggctgaaaggctcgtgagattgcacccagcaggaacagcttcaacgcttcataggtgtaatcatctgcgtcagctcccagaaagtgccgtaggcagaagcggattcgctctgtcccgtcccacacaagggaacttaaataatcccggatggggtggtacttgttttcattcgccacaatcccgatggcgttatcaatctttttctcattggtaagcccgtaggtttcttccagatagagaagcagatatttcatgtccgtatcgtttaaggcggtgctgtccctgtggaagccgatgggctttatgatgtccttgcggtcggtcaggatgttgtatgcgatagccccggaaagcagcgggtcacgctggaatacggtcaggcagttccgtatgctctgacggacaccgcctttctcggtggtttccagccccgccttgatttcctcaatgctctggggcggctgcatagcgttcatggtgttttttagttcttgctgcgtctgcggctgcaagctctgccattcgttgttcaagctgtatcacatcctttccgtagtccgtaatcaaagccgctttttcctctgtctccccgaacagcagcacatccagcagatattccacttgggcttgcttctgtaaggcttccacaaaccggggatgaacggcttcctccggggagtgcgggacataatcctttctccatgccctaagcaggtggagataatcggcaaggatacggaagcagcggttctttgcttcctgaaactgttcctccggggatttctgccggggcttgggcttttttacctttcccggcggcttccagtcctcataagaaagcccgaagtcatttgccagttgtacggcggcttctttctttcccagcccatacagggcggcgacaaaatcaatcacatccccatccgcaccgcagccgaagcagtggtaacgccgatccagcttcatgcttggggttttatcattatggaacgggcagcaagccatcccgttccgccctacatggattccataatgctccgcagcctgtcttgttgtgacggactgcttcacagcttcaaatacattcaaatctatccctccttgaaaataagaaaagcacctgacattctctgattgaaaatggcaagtgcctgttaaagttccatatcctgttgtctgtgtttcgcctgtgccggggcggttctttgtgcttttttctcgtctgccttatcctgcaagacttctttgataggctgtttcttgggcggctctttgctttcttctgtgccgggggtggctttccgtacccagtagcgaatgtcccgcagcttcttcaaatcctcctgtacctcggtcagcggtattttcagggctgcaatttcttccagaagcgtttcctgctcctcttgcagctccttttgggtactgtccttatcgtccgggtgcttggcaaggtaggcggcggctttcgcataccgggcaacctccgggtgttcctgtttgaatttctcctttgttttcttaaaaaatatcttctggtacttctcatagacaggcttacattccttgcagtctgtccggctggcaagaatcccgtcaatcactttgctgcgggcttcctttggcttcatctgattgcggtaatctgcggctgatttcccggaagattccagaaatgcttctaagtcctccacagtggaaagccccttttgccggagataggacagggcttcgctgactgcctttaagtcctgtgaagtcccccggttctgtccagcccttgtccagtccttcgcaagtattactacctcaagctgaaagagaacttttttgacagcgactccattgtgctgctggaagatatgaaagacgggattttatattccaatatcctcttgaagctgtacttaaaatcgctgaaaaacggcgggaagttgcaacttgacgagcatatcccctacacagcgcagatgatagcgacactgacccgccaccagatagggacggttgaaagggctttagagattttccggcagttggggcttgtggagcagcttgacagcggggctttttatatgaccgatattgagctgatgataggacagtcctctaccgaagccgagcggaaacgggctgcaagactggaaaacaaggcacttttaccgccccggacaaaaggcggacatttgtccgacattcgtccaccagagatagagaaagagatagagaaagagatagagaaagagatagagatagaaaaagagagagagggagaaacgggacgccccgcccccgccgcttatggcagatacaacaatgtgatactgaccgatacagagctttccgggctgaaaacagagctgcccgacaagtgggagtattatattgaccggctttcctgccatatcgcttccaccgggaagcagtaccacagccatgcagccaccatttacaagtgggcgcaggaggacactgccaaaggcaaggctgccccgaaacagggcatacccgattattcatgtaaggagggcgagagcttatgaaaaacgagattgaagctatgattacggacattacaaccactaccgccgaagcggaggactacacaggcgaggacgggcttttatactgcggtaagtgccatacacccaaagaagcctactttgcagagagaaagacctgtttcggacgtgaccgccacccggcagagtgcgactgccagcgggcagcccgtgaaaagcagcaagccgccgaaagccgacagaagcaccttgaaaaagtggaggacttgaaacgccggggctttaccgaccctgctatgcggaactggacatttgagcatgacaacggcagaaacccgcagaccgaaaccgcccgcttttatgtggagagctgggaaaccatgcaggctgaaaatatcggctacctgttttggggcggcgtggggacaggaaaaagctaccttgccgcctgtatcgccaacgcccttatggagaaagaggttgccgtctgtatgacaaactttgcaaccatactcaatgaccttgctgccagctttgatggcaggaacgaatatatttcccgcctttgcagctaccccctgctgatacttgatgattttggtatggagcgaggaacagaatacgggctggaacaggtttacagcgtgattgacagccgttaccgaagcggcaagccgctgatcgccacgaccaacctcacgctggaggaattgcagcacccgcaggacacgccccatgcccgtatctatgacaggctgacttccatgtgcgcccccgttcgcttcacgggcagcaatttccgaaaggaaaccgcacaggaaaagctggaacgcttaaagcaactgatgaagcagcgaaaggagagcctatgacagaatgtgtgcgtaatatggtcgtttgatgatatgggactaggagaacaggttattttatccgataaagaaagcaaaggaggttgctatgaaagttcaaggaaataggtatattaataatcctgagatgataaaaaataaggtcgagaagaaaacaactgttcctcagaatattatttcggaggatgatgtgaaaatcagtgattcagcaagaaagttagttgagactgctcgtaataaggtatcggattttcatacaatgcatttttcatctattaatggagaaataagagagataccagcagaatataaatgtgaaaatttattcaaattagatttgaaagcagcttccatttctggagaacaaagtgcgtttgaaggctgttcggaaaatcagtcagaggtttttgaaaaatggctggacgaaaatgcttctgaatatttgacagaagatgaaatgaaagatttaaaagagaagattaatgcaatgacagcagatgtagattttttgaatgctcaggagggatatagaggaacttcctatgaatctgtatttttgttaagtgcaagtgaagcggggctaagaaaagtaaatgaaatgtatgttccagagcaattacaagcaggtttttcagacatgattgacgaatatgttcattttaatgattcggcacgtaattctatcatggagaaaatgacaccagattacatggttgttggaattggaagcaaaacagaatcttataagtacaagtcagaaataatctcagatgagacagctttttatacaaatgagaagaaagagataagtggtatctgcaatcagtttttaaatggtaaaacagatcaaaaattattttgtaatgagatgaaagaccgtttaaatgattactatggaagcaggtatgaattaaggaatcagccagaagctgttgaaggcagagtaaataatatgctggacaaattgcagcatatgtttggcgtttaatgttgaaaaagggtttggagaataattatgaagacagtaacagatgtaaacacagtaaaccagctgttgacatattcaaagcaggcagaggcaggaatacaccaaaaagcaatacagatgttgcttggagcaggaaataataaaaaacaggacagtttaagtatttctgatgctgcacgaggcttttcaaagcaatccatagctgcactgatagataaaaatgcgaatatttctaacagtgaattagcttattattttgcaaactataataattcaagtgctattttggatgcaatcaattttggggagaatgtttcctgtggatataattctgattttaaggagtacggggttatttcctttgaccttaatgggagcagacaggtagtacctaattatgcagtaccgaaaatgaatacaagcaccatgtcaggcatttgtgctgcgaataattctctggtactaagtaataaaagttattatgcatggacaacatcaagtggcggtaaatatacatggacggtcaataatggaagaataggctgggcagcctcggaatcgttgcttgcagagaatacaaatcaaaaaggaacaaattataagtgggaaatgtgtaaggcaggcaatatcctgtctgatctggcacagggaaagagtgtgtgggggtatctctacagcaatgaggaggtattgtccgtctgtgagaaagtcgggatttctccgggattcttttctatagatgcgggagcaggaaaacacacttatttattgcaggaatcaggaaagaccataaatgttgacgcaaagataaaacagttaaatgatataaactggatagaaatcggatataaagaaggagatacgttttccgtttatggtaaagagtatgctattgacagcagtgggcatatcaatgtttcggcggaagatgaatttacatcaacggaaattaaatatccaagtcgttcaatataatagaaattattttaagtttcaataacagggaggtaggattatggcaattacaggtatcaataacagcagttacacatcgtattatgcttcaaattataagaatactgtaaaaaaaacagatagtgaaaaggatagtacaaatacaaaagatggcaacgtgacaacaagtacagttgaattaaaaacatcacgtcccggtgtgacaaaaacagagcagattaagacagggtatagtaatgtaaatgattattcaaaatacttgcaaggaaaataccattatatgaatatagggctgacttcaatgcagggtattccgacaacggtatctgtttcaagtgcatttttacaaaagtgcatgaatgatccggaaaaagcaaagtatttggaggaaaacttagcagccattccggattgtacaaaagatacgattaatggatgtttgggcactgtgacaaatcagagttatatgattgatgcaaacggaaatattatagagacagcatcttgtacaaatgatccagatgggaaaatagcgaaagagaatgctgaacgaaaagcaaaagagaacagagaaaaagaggaaaaagtaaaagagaaaagagctgctaaaaaagcagaggaagaaaaagctgcaaagcaacgtgcagaaaagtcggcagaaagaaaagaaacgggtgattataccttatccataactggtaatgatgtaaaaagtatgacacagagccttgtagcaggatctgtgagtatttctgcacctgatagatcaagttttgatattaaggcataagagggttcggtaaaagaaatcaatgcattagttggaagtgcttgtttcctattatggcatatccaagctaacgatagcaaaaatggctggtgttgaggaaaatgatattgacaggcttttagtcaatccaccagaaaagattgaaatcgaagtaaagtataaaattgctgtgactgttatggaactgcgattttggctaaaagattgtgaatcaccgatataatcgggatttgtgagtagagggcacttatgaaaaataaaagtagaaaatttcatcattgacgaggaagctgcacccgtagtcaagcagatatacaatttctgccttgccgggaatggtccgaccaagatagcccgtatgctcacagagcagcaaatccccacgccgggaacgctggaataccgcaggacgggcagcacccgccgctaccaccccggctatgagtgcaagtgggcgaccaataccgttgtagacaatttgtaggacttttgtgtgtgtcccttatgggcacctctgaacaaaacataaccgcgcgaagccgctgtctgagtcggcatctgccctattttcaatagcagatgccggcgagttcggttcgcgcggttttatattgtctgtgaagaggtgccatttttctttgcggatgcgtgtggtgttgtatccggcatccttaagctgtgaaagaatatttttatagattatcatttgaagacctcctttaataatattatatcacaaaaaagcactttttaaagtgcaaaaatatacaataaaaagcaccttatttcgtgcaaaatgccagtagacaatgcaccttaaaaggtgtatatttatatcataaggaacaggaaataaaagaaaacaggaggaagaaaaatgagaaaggaatttataaaaaatgttttagatgttgaagtgaatggattcgcttgtacggtacggtatatagttagcgcaatgtacaatgtaattgatgatgatggttttgcaacaatcgagcagaaaattgttgaagatgtgacattttctagtgatgaacttgagaaagagggtggaacatctaaggtattagaagatcttaaagagtgttatgctccgttatgctgcagttagtaaataatttttcccgccccggaggttacgagggcagaaaggaactgtaatgacgagaaaagatgagattgaaatggagatcagaaaccaggcggtgcggttatatccaagttgcgttgcgctttttgaactgccggtaatggtatatacgcagatagtaaaagataatgatacgagaaagagaccgtacagggtcagcattgagagatgcagcaaagtgattcagacgatgaacttttagacagatcataaaaacaaaagtagcccgccccggaggttacgagggcagaccagaaaggaaatgaatatgacagatggagaaagaaaaatagaagttgctgatctgattagcttggaagaaattaaaaaggaacataaggcaggggaatatctggcgatcgggagtgatggcaaggagtatgaagcctcatatgatccgcgctttcttacagatggtgtaatgttttttagcattccatcagatgtgaaaattttaggatatttaaaaaataaaaacgcttattgcaataagacaattccatgttgtgggtgtgctgatatggacatttgtcgcggtaaagtaaagaataattgaaattgcttgtgcgggcagtaaacaatggtcacagaacctcggcagaaagtaaagtaagccggggttttatattcgggttcgagacccgaagcgccgcctttgcgctatcggctcacagtgtaaagtaagccggtatgattttgcggtgggatgtagtggcgtgagaaaaagaaaattcgctccttgttcgccgatctcaacctagagatagtcgtaagagtggattttttttatagatagtaacgagggaaggaggttttataaaatgacaggatggaggaagccggatggatagagatggagtgaatggcgtgtataacagaccatatgagtcattgtatagtagatgttttcggtggtttggtttgtgggcggaatggcagcatgtgctggaaaatggtgcaaatgccttaaaaagcacggatggacagatattaaatgggatccggaataggatggcgtactggctgtcagaacttgcgcttagtgaatacacgatggatgatgtgcgcgaggaagcacgaatgaatgggatggatctggatgatatgatgatggagttgccgccggtgatggatgaaaattatatgctaatcccccagctatgctggggagaatggaatagttggaaacggtgaggataaaaaagaaaaacctcctgtggtatattgagaatggtgtcgcaagccaaactcaacacaggaggtggttcaagtggacaataaaagcatatcacacactagatggaaatgccaatatcacatcgttttcattcccaaatatcggaaaaaggtattgtatgggaaggtaagagaggatgtacgtgaaatcttaaatacactatgcaaatataaaaatgtagaaataattgcaggagcagtttgtgtagatcaagtcttgggtaaagggcggtaattggttgttggttggtctgtcttaacataaaatcctccgtttccgacagccagccccactattccgtaccttgattgtaccacatggggcggctgtctgtatagcggcaaaagcgtcaaatctgcttctttatggtcggtcaaatcgccgttttttgtgtagcagcttccgcttccagcactttcatcatcttgtcggctgcggtgtcggttgcgccctgcttgaagaagccggaaacggtaaggacggagttgcccatgcggatttccgttacacagtccgggcggcggtctgttttggtggtgcttgtctgtttggtttctgtcataggctctcctttcgctgcttcatcagttgctttaagcgttccagcttttcctgtgcggtttcctttcggaacatgtgttaagcacgccgccagcgttcatcctgagccaggatcaaactctcatgttatagtttgtttccttttccagaataatctggcttattcagatgttactctgaatttactgttttaggttgttctttataagaacgttcgtctgtctttcaatctcttgatcgacagcttgaaatttaggatctttcaaggtttattcactgttcagttatcaatgtacaattgcatattgcaattatgtgaggtacatgctataattcatacataccgaaaaaggaggcaatcagcatgaaagataaagaactacgcaagctgataggcagcagggcaaaacagcgtcgtctggaattaaatctgacacagccttatgttgcagagaagatgggagttaccgcttccacaatcctgcgttatgagaatggttcgattgacaataccaaaaagatggtgctggaaggtctttcggaagcacttcatgtatctattgaatggctcagaggggaaaccgatgaatacgaaaccgatattacggataagaaagaattacagattcgtgatgcaatgggcgatattctcaaacagttacctctcgaccttagtaaaaaggaagatgctttttccaaagatttactgctgttgatgttaaagcaatataacctgtttctggaatcattccagtttgcctgcaagaattacaagggcaacacgaatgaagctgatattgcaaaagtaatggggtttgaatcgaatgatgaatataacgagattatgtttctccgggagatcacccacactgttaatgcctttaacgacatggcagatatcgtaaggctttattccaagaaaccggaaatggcagaacaaaggcttgaaaatcttttatcagaagttttgtatgaggattccgattcggtatagaacgacaaccggagttatgatacatataattttcatccatcaccggcggcaactccatcatcatatcatccagatccatcccattcattcgtgcttcctcgcacacatcatccatcgtgtattcactaagcgcaagttctgacagccagtacgccattctattccggatcccatttaatatctgcccatccgtgctttttaaggcatttgcaccattttccagcacatgctgccattccgcccacaaaccaagccaccgaaaacatctactatacaatgactcatatggtctgttatacacaccattcactccatctctatccatccggcttcctccatcctgtcattttataaaacctccttcttactatctataaaaaaattcactcttacgactatctctaggttgagatcggcgaacaaggagcgaattttcttttatcccacgccactatatcccaccgcaaaatcataccggcttactttactctgtgagccgatagcgcaaaagcggcgcttcgggtctcgcacccgaatttaaactacaacaacccaacagcaccgccgaggcgctccgactacagcgtctggataatacagccaaaatctccggaacgatacacgttaatctcagcagcactcttttcaaaagtctttccatcatcatcatagattctaagccaccctttaaaggctgctaccttttcataatggcttccaatctctacgtctgcaccagtgaccatatacgcccggtagcttccatcttcgccaaaaaataaaaactgattctgaatatctccggcacctcctccaaccagtaccagcgccccaatgtcgctacttccaatagattcctttgcaaaatctttatatgatttcatcctgcatcctttctgccctcgtaacctccggggcgggctacttttgtttttatgatctatctaaaagttcatcgtctgaatcactttactgcatctctcaacgctgaccctatacggtctctttctcgtatcattatcttttactatctgcgcatataccattgccggcagttcaaaaagtgcaacacaacttggatataaccgcaccgcctgatttctgatctccatttcaatttcatcttttctcgtcattacagttcctttcatgctatgcaaatttcaaaaacatcattttcaatgtgttcatattcgactttttcaaaaattccgattccataaaaatcagctgtcaagtttccgaaatggtcatattccaaagaaatattattttccttaaatacttttatcgcgttgtcattcttgcttcctttttcccagatgaatttcaaaccagtttttctcatatatttatcctcctgttttcgtttatttcctgttccttatgatataaatatacacctttaaaggtgcattgtctactggcattttgcacgaaataaggtgttttttattgtatatttttgcactttaaaaagtgcttttttgtgatataatattattaaaggaggacttcaaatgataatctataaaaatattctttcacagcttaaggatgccggatacaacaccacacgcatccgcaaagaaaaacgccgaaacagtagaatctttttccgaaataggaaccggtaacggcacccacttcaaaggcaataccaaaaatctttttcaaaacctgcaagaaagcgaggattaaatatgtactactattcgactgtaaacaatattgtaacaacccacagcgcgctcctcgaaaaagacggcttcgacatcgtaaaagtccacttcgagcgcgggacttaacccaacatctcacgacacgagctgacgacaaccatgcaccacctgtcaccactgctccgaagagaaagtatattacatacttggtcagtgggatgtcaagacttggtaaggttcttcgcgttgcttcgaattaaaccacatgctccaccgcttgtgcggatccccgtcaattcctttgagtttcattcttgcgaacgtactccccaggtggaatacttattgcgtttgctgcggcaccgaaggtaagattttccacagccaaaatcaatgatgtgaagtgtttctgatgtatcgtccccgaccgcatcaccgaccatctccaaaaaacggttgatctgccggaacttgtcatacatcgtgcgcacgacctttccttcgggtgtaaacactcccatatccacaagcggtgcaatcggcgttccttcctccagaatgtactgctttttgcggttgtggctcccgcttgcctttgccgtcgtctgtgcattctttttcgtcttgtaggttacttttccctttttagactctcccgagggggaatgcggtcactgcggtgacctctgctgaccaaggcgaaaatgtctgcgccttttcccatggtcagaccgtctgcatgaagctgttctgcggaacatttcttgcagacggcggcagtgaaaaccgtatctttcactgcctgtccataggcagcactgcggtgcgcctatggggacgggagatgcgaggggctgttgccggagcatcacttctcccgttttttctgccatacgatgtcgtagccaagcacagcggcaagctccaatacttccttgtatcggatgctttcccgctgcaattttgcggacaggttggaaacgctgtcgctccatccgtattcgtccgagagcaggtcaacaacttcctgcatggtcatcccggcatggatgatctgtgcctttatttcgttgcgtacattcatattgaaaaatcctccataattctatttgtggttcggtgcaacctctgcactccaaagcggagcagatacaccgaacagcgaaaaatctgcaatctccaaaatccgttcagaatttcgcttgtgatgtcctgtccatatatgaccatatcccactttattgtttcgtgcaatttggtctggaacagtgaaaacacccattgttccgtgaacaggttacacggttcagagaagcacgatttcgtgaaatagcttcgtcctgcggtcaaaaactttgctgtttccattaccactgattttcaatgcccgaaaacaggtcagctttgaaagctgctgtttcctataactggagaaaacaggggtaaatgctgcgtacatacgtacagagcatgactggcaaaatcattcccgccattcctccggtacgtacgtacacggcgaaacatcgtaaaacccatttatatgaggtcttgccactgcttccacacccataaagccccacacccgccgtccggcagagttggtgatattgttgcaatgctccagattgaatctcccagcattgacaatcatggcgtcgctgaagctgcgggctttcagcggtgcaagggaattttcttcgcaccacatccggtagatttcatagaaatccttggaacttatggacgcatccgctttacactggatgtatccctcggaatccatgaaatcaaagatattgttgttgtcacgcttgaccgcttcccggttttcccggatacggtcactctccgtaaacttaaagttgttggcaacaagccgctgcaagccttcaaatgcccacaggaagataccctcggcttcagctttcatcttctctgcaagatcaggatcgtcagctctgtccaccggcttttccttggtggtcagcacaagctgtctgcgataaaatccgtcactgcggtcatacagggcttgcagatcaccgttactgaatgccagcatccgggcgaacatccagccctgataactctgcttgcctttacgttccaaatccatcttgccctgtgctgtcacgatggattttacatagttggtctggcgcagagcttccatccgcatatcatcatctacgcacagcaggatgtgctccagatcggcacgggcaaagcggttttcagaaatcttgccgatgctgccgtccttcatgtttgtgccaaagatagccgaaagcaccgcaccgatttgggatttaccctcgccaccgttgcccttaatcaccatcatgcgctgtcctttgttggaggggatcaggcaataaccgataaactcctgcaaggtgggaatgtcttccgcatggagcagtccattcaaaaagttcagccagatcacgggcgcaggagcatcgggattgtagacaacaggcagacggcttcgcacgatagccggtctgccctcggtaaatgtgccgttcaatagcagcgtaccgttgaacacatggatgcgatcctgctccggcgggaagtcaggcacttgcgcttccagtttcagcacttccagaatgttggtgatcttccgggggatgttgttcacggcacagaatttcagcttgtcgtaaatctccccacgcagtgggagatcgtccgtcactcgaccatcgggcgtaaaaaaagctccgtttgcgaagatgattctgcgctcatgcagaaattcttcacaaaacagagcttcgttgatgttctgcccatcaaaccagacaggcaaattcatatcaggcgttttccggttcttcgccatggtgcgccacctcctttttctttcgtgtgatgtactcttgcagaaaagtaatttttccctccttcatcagctcgtccaccaatgccacccgctcttccagatcacccacggtcagcacatctgccatatattcgataggacagtgcatctggcaggcttccacaaaacaatcatccagagcctcctccggtgttttgggtgcataccgcactttccaatcttccagcagatgcagataatccgtcagcacccggaaacacagcatttcatcctcccggaactgacggatataaggacgctttggcttggctatagctgcggcagtgggcggtttcgggtcaagtccgaagtccgaagccagcttttgcgctgcttcatagctgctcatattgaacagccttgccacaaggtcgatcacatctccctttgctccacagccgaagcagaagaaatagtcctcattcagcttcaagctcggatgcctgtcattgtggaacgggcagcaagccataccgtttcggttgactttcagcccgtagtgttcggcggcttgcttgacactgattgccgctttgatggttccatagattgtcataaaaaaacctccgttcataatattctggaaagcacgaagcacccgcagtgattggcaggtgcttcgctccttctattatggttatgacggattttccaaaaaacaggctaatgacaggacaatcctgtttcaaaaaacaggacaacttatctgaggacgtagatttcttcacatttacatgatataattaaaaaaatgaaaaaacaggacaggaggtaagcatgaaccaagaattgatgacattggacttctggcaggatacggtcatatatgagggcaaaacattccctgtcggcacgcttgcctgtgatgcgctgaatgttcctgcggatactattacaaaaatgaacgagcaatgcgagaaaatcaatctgctgctcggaatattaaacgccggacaggatgcttctgcactctgtcctattgcaaaggaagctgctctgacgatgcttgatattatcagtcaaacaccgccgttctcctatatgaatatctcaaagcacagagaacggattgaaaaagtctttactgtggacaatgctctgaaatatgtggagttcgccataaaagccgtaaccaattctttaccgttcgaagaagttccgaaatatgctgatgcggtgatgctccagcgctataccgctgtatgcgggcatctggcttactcccttgaggaataccaaaaggcgatgcttgattttgcagaacaatcggacggaaacgaagcagaccgcaccgcagagggctttgcgaaaatgttcggcacctatttcccaccggagttttctatcacagagggcaatgcctggatgtctaccctgaacaattccgttcagtatgtatccgtcatccgtcccggcgaaaaagttgcgaagctnnnnnnnnnnnnnnnnnnnnnnnnnnnnnnnnnnnnnnnnnnnnnnnnnnnnnnnnnnnnnnnnnnnnnnnnnnnnnnnnnnnnnnnnnnnnnnnnnnnnnnnnnnnnnnnnnnnnnnnnnnnnnnnnnnnnnnnnnnnnnnnnnnnnnnnnnnnnnnnnnnnnaaaatctgcggcaagtggtttctgaccaccaacgcacggcacaccaaatactgtggcggctatgcaccgggggacaagctgcaccgcacctgtcggcagatcggcaacctgaaaggcagagaacaacgggagcttgcggacgatcatccggtgaaacagatttatgagaaacggctgaacaccataaaccgctatgtgaagcgtggtactctggacgctgatcttgcagaggttatgaaaaagctggcaaaggataaaatgcttcgagcgctgagcaatgtcgcctataccaaaggtgattacgaaaaagagatgggacaggctgctttgaagaaagaagcaaaattacggacgaaatgaggaatatgtaatggcacagaaatatgatttaactgatattgggaatgcgcttagccgggttatggacaatcctatgaccaaaataatccgttctggctctattggtgtgttgggcgtagtaaacccagttgcgggaattgtaggcggaataggaaatgatcttctatctgaatacaataccttcaaactcggccatctactgaacggtcttgcatctggctttaatctcgaaagaagattgaacgagctttacaactatgtaaactccagcccggaaaaggctattatcgtagccaatctgttcaaacaaaccgtaaatgcagaatgcccaaaggtttgcgttatttatggtctaattcttgcaaaccatttagaaacacttacagaattcacgcacgaagaattgattgtctgtaaagctttggaaaacgctacggattatgatctgaagaatttcaaagaaataatggagaactatcttaagccaacatcaaatggaagaagaattgtatttccaaaagactttgcagatattgctgctttcaccaccacatgcgattggtgtgtatataatagaatctttgtttcccgcacggcagagtggggtgaaatggaagaaggcgttttggatatgagcacgtactattacgaggcaaatcctgcatctgttcttctggataatataaatgctgcaagacaaacttggaattatagttaattattcccgctgattacttagaagggaggtgcgctatgctgaatgattttacatggaatatgaccggatacataccaaaacaccaagtcaatcctcacagtgatagtatcattacctatgtggcagagcgcatcttccaactggaaccggagccgccagcagtggacagtctgaacgaatatatcctgtctgccttgcaggaaaagaatttgatacatttctcattcttcctacaccactacgagccgcagcttaacaagcgcatcaaagactttctcggtgtggatggcggcgatttgtacgacacagaccgatttatagatataaagctctcctgccgggaacaaatgctccaaaaactgatggactatgaccttaccaagggcgcagagtatgctacatacatctatccgttcatccgggatgctatgctccgttttcgcatgggcgaagaaaaatggtcggtgtcctctctgaccaattacaaaatggtgcggtcaatggcacggctgtaccataacaccaaggatgcgatcagcgaatttgtcaggaaatacaactgtgatctcgctcttgcggaagaatatctgaaagttgtccgtggcatccgcaatcagcagcctttctatgtgacagacgaggacggcgaggaaaccggcgaagatgttgcccttgatgatacttggaactatgccgacattctctggaacggcatacaggcggaaaaggtacagcgggcttttgagaagctgaactaccgggagcagaccttgcttgaaaagcgccttgcgatctgcatgacctgcgggcgtgtcggctcatggaaaggccgccccacctttgaagaactggcggttatgtttgaaggtagcacagccagcggtgcagaacgagcctatcggaaagcagtagacaaactggcggaacttctggttgccgagggcgcaatccatgctgtcaggttgaaacagaaatccaaaattaagcgcaaaaaggaaatcgccgccgcaatctacgaataccaggcagactgcgacggcgaatggggcgatatttcgttggattttgagaatggtacagcaaagatcgtccggcttgccgattgggacacgatgagaacaaaccgctttgcgaataaggcaatagcctatcttttgaactgtgagaatgagaagctgccaaaagaaacgatggtagcatttgaatcataaaaaagaaaaaccgctgcaatttccacactacacgaggatgaaaaattacagcggttttatcagcggatgtatcttccagaatacacattttttgttttgttacggcgcacaaaaaatatataaagcaaaataccaccgcaaatcaagaataacgaaagcacttgcgatactctgattccgggaataatataaaggctgtccgtacgcaggccttcaatcaaaaatcttccaagaccgtaaatcacaaaatacatacaggtcagggttccagcctttggattttttctactgacaattagcatggtaatcagcagacacaaattccacatactttcatagaagaatgttgcttgatgccattctccaagaacatcaatatatacggcataaggaaaaaactgcaacgatgaatctgtaaccaaattgccgaacgcttcttgatttacaaaattaccccaacgtccgattgcttgtccaagcacaagacttggaacgactaaatccagaaaacggaacaaaggaaatttgtgatggcggcaaaataaaattgccgtaaccagaccgccaatcactccaccatagatggcaagcccgcctttccatattttgaagatggaaagaatatcgccggaataactgttccactcaaatacgacataatatcctctggcgcagacaatggcaatgggtaatgcaagaagaataaagtcaaatatcagatcgtccttgagaccttgttttctggctcggtaaattgcaagtattacacctaaaaccataccgacggcaataattacaccataccaggcaatgctccatccctctatgccaaataaattttcaatcaaatacttactcatatcaacaccttttctacacaatcagaaattcattttcttgttctatatatctgcaaaagataaatataccgcaaataatttctgggacgaaaccgcaaatatcttccacaatccatcctcctgcaatgcccttgtgcataatacgaagaacctctgaattgcaggtgtttaacagagaataattctggctattgtgcatggtcaaaagatattcctcgccgttcacaacaatattggcatggtcaactcctggcattctgcaaattggccatcccaccacatcgggatcatcaccatctgcatatccggggcgagcagaaccgactaactgattttcgttgtcggtcagtaaatattcccgatttcttacatcaccggaacttgcttttgattcatcgagataacgaacgtctgccgtcaaaagcagctcacctgcgatgctgagaatctttctttgcggaccgagcaacacactttttattcttgccaaggcaagctgagattcatttttataaaggactcctgcctttatcgtgtatttcataactgcgcctcctctcttatacaagtgcatacaggatgattcctgcaaatcccgaacctgccataacccaaagcggattcggtttccactttcttaaaacaaaaatgccaataacaaaaataatcgcagcaatcaagtccaaagatgccaaatcattcggaagcgttctctgtccgtagagtgccataatcaacagtgagatacccgctgatgcgatcattgcaattaccgcagggcgaagtccggcaagaatgccctgcaccatattcaatccacggaaacgataatagatataggcaagggtcattacgataacacaggatggaaacacacagccaaccgttgcgatgacagcaccgggaagacctgcgacttggataccaacaaatgttgctgagttaatcgcaatggggccgggtgtcatttcagcgatagtcataatatccgcaaattgtgtcattgtaagccaaggatgaatatccaccacttgattctgaatcaatggcatggcagcatatccgccgccaatactgaataatccaatttgaaaaaagctccagaacaattcaaggtatatcaccgtttatcacctactttccgcatttttccttgatgccatgtatccgctgctccgatcacgccacagacaagaataatgactatgatattcacagagaaaaagcgaacggctacaaaagaaccaagcataacaataacaggcaatagtcgttttttctggaaaatggtttttgccatattgatcacaacatcacagattactgccgccactccgcagagcattcctgccattgccatatttacaatggcattatctcgaaatgcctgataaaacatggaaatgatagaaataattatcaatggcggcaatatagttcccaataccgtgagcattgcgccggggaaccccgccacatgataacctaccaaaatggaagcattaactgctattgcgcccggagaagactgtgcgattgcggtcagatccatcatctcatcttcttcaatccaaccaagttcctccacgaatttctttcgcatcaacggaatgattacaaatccaccgccaaaagtgcaagcactcagttcaaaagtggagaaaaacaattttttgtatttttgcaagctattcacttctaaaaatgccgtcctttctatgtttattaacattataccgcttgatttctgataacggaaataatataattttacagaaaggataagtatttttatataaggtgattgttatgacgatacgacacatgataatatttcgtaccgtatgcgaaaatggatataattccaccaaagcagcggaagttttacacatgacacagccagcagtcagccttgccattaaggaactggagcaatattacggagtacacctgtttgacagaatcggcagacgattgcaaatcaccgatgcagggcagcattttcttcaatatgcgatacatatatccgacttgttttcagatatggaaacagggttgcgtgattgggattctaaaggagttctccgtattggtgcaagcatcaccatcggctcgcagtttttaccgaactatgtaaaggcattctctgaactctgcccagggcttgatgtcagagttaccgttgatcaatcagaacgtctggaacaaaaaattttggcaaatgaattggattgtgcgttgatcgaaggtattgcacatgatccaaatatcgtttcggaagcctacatggaagatcatctgagtgttatatgcggtacggataaaggctggacacaggggcaagttatatccatagaagattttcaaagacagcgatttctcttgcgagaaaaaggcagtggcacacgagaggtgtttaaccgtgtagttgaacaggctggcttccacattacaccagtatgggaagcaatgagcacaacagcactggtcaatgctgcaatcaatggattaggaattgctgtattaccgcatcgaatgattcttccggctctgcgacaaggtttgatttgtactgtcaaagtagaggggttgagtttcagccgaaatttccatataattcatcataaagataagtttttaacaacttctgctaagcgatttattactttgtgcagagattttgagactgattaccccttgccttgttacaacggactatatgaataaaagattagagccgcagttcaatcacatgactgcggctcttgcaatattagtataaagatttatattcagttacagttttcagatatgcttcgggattgccgttcagtatcagctcagcgtatgctaccgggtcattgtaaatcagataatcaagctctgatcgctgatacatattgtcggcaacctcattctcaacggcgatggtatcaatggcaatcatgctgccatcaaagaatttcagttccacacaggcagtatccatgttgaactcacaagaaatcaatctatccataagaaacctccattctgcgggatgttagatcatcccaaaatatttgaatgcttctcggattgctttctctttttccggcggacactggggctgtctggaatcctcggatttcggcagattatagtttttacctacctcaatcccacatttccgcttaatctgtgagatatacaggttagatacctttaatccgctatgttccagtacatactccttgatctgcggataggttgctccatcctggaactccgacatatccatatcttccaaagagaactcaacccgaatctttttcgagtcgacctcacccttggaaagcaagacaaccgtctccacatgcacggtcgccgggaacatatccacgcagcataccttcttcacctcataccccctcgcctgcagcacctcaaggtctctcgccaggctggtcggtttgcaggagatatacaccatctgcggcacaccgtagcggatgatcttctccagtgctttcgggtggatgccgtcacgcggcggatcgagcacgatatagtccggcttctcctcgatctcatcaattaccttgagcacatctcccgcgataaactcgcagtttgtaagaccgtttaactttgcattctccttcgcggcttcgaccgcctccgggatgatctccacgccgattaccttttttgcaaccggggcgagcatctgcgcgatcgtaccggttccggaataaaggtcaaacacgacttttccatgctccgcgacatccgcatccgttccgctcggcagggcatccccgatgaactcccgcgccgtctcatagagcacctccgcgcccagagagttcgtctggaaaaaggagaacggtgtaatctgaaaacgaagtcctaacagttcttcatagaaatgatcctgcccaaaaagcacatccgtaccctcgtttgtgacggtgtccgccacactgtcgttgcgggtgtgaagcacaccggtgagcgttccctgataggcggcagcacacaacacatccttccatccggcaagaagcgccgcttcccccccttctgctatctgtgtcgtcgttactagatccaccaggatctcccctgtctttaccgccttgcgcaccagaagatgacgcagatatccggtgtggcgcagtttgtgataatacggcagattccgctctttaaaatagtctagcgtcactgtaagcaccgtgtgaaaatcatcgtctacaatccggcattccgggacatccacgatgtcataaaagctgccacgcttgtgcatgccgagtgccagcggtccgtccttgtacgcatcgccgaacgaaaactccatcttattccggtactcctgctgtctcgggctcgccttgattccaaggaattcgtagtctgtattttccggtacaatgacgtcgtcgatcagtttttttacctgtgacgccttcatggcaagctgctcctcgtaaggcagcgtctgatatgtgcagcctccacactctccggcatggatacaggcagtctccggctgctctttcgccgaacgctccagcacctcaagcagtcttccctcgcattttcccttgcgcactttattgatcgatgcggacactttctgtcccgagactacattttttacaatcacgcgtcccccgtcttccgttctcacaattcccttattggggaactctacgcattctactatcccctcgataatctgtccctttttcacgttctatcctccattatccatccagtttcttctgcacattgccaaacataaaaaatcctgcatgcaggattcactcgcctgactcagccacttacgatatcgtttcctgctacagaataaagtgtgcgcctgccgcacacttgcgcctgtcttggcaggctacctgatgcggtatgcaaagcattatttacctcaccacgagatgcgcatccccacagagcgtttcctattacataaaaatagggctgcatctctctgcagccccatgccctttgtcttaatcttcggttgtttcctctttgtcctcagactttgccggcgcttcctcatcatcatcgtcctcgaagaaatcatcatcaaaatcatcatcgaagtcgtcctcgaaatcctcaagataatccggcgtaaagaagcggtagatgccgtatactgctgcagctacagccgctacaataccgataattgcaaaaatccatactaccttggaggtcttcttctcctccacttcttccttcttattcagaagttcgtttaactttgtcatgttgatcagatcttccatcttattcatcagattcccctccttgatttatcttcatttattgcatgtcttcttattacgcacattatagcatatctttccctgttcgcctataaaaaatttataaattaacacattttatactttttttaattttgcgaacgccgcaaacattttcttggttcccgccgcgtcaaaatcgaccgtcacctcaaaatctctgccgccgggcacgatggcttttaccgttccctccccgaacttcatgtgggagacacggtcgcccacaccgtagcttaggcttccgccttccgtatgtaccgatgaaaacgctctcgcctgcatactctgccctgacagctggtcccgcatcgtcggccgtttctttttcaccggctccgccgtgtgccgctccctgttctccagatacgccggctttttgatctctccgtttaaaagctccggcggaatctccttcacaaaacgtgagaccttgttgtactgtgtctcgccgcgcaccatgcgctgtctcgccgaagtgatgacaagctccttcatcgcacgcgtaatgccgacataggccagcctgcgctcttcctccagttcactgctggcattgtctgacgtgatcgacatatagctcggaaacagaccgtcttccattcccgccagaaaaaccttcgggaactccagacctttggcgctgtgcagtgtcatgagaaccacataatcgttctcctcgccgacgctgtcaatatccgccacgagtgcaacctcctctaagaaaccgcttaatgtcggctgttcttcgccctcctcgtaggcgaccaccttacttaacaactcatcgatattctcgatccgcgcctccgcctcgtcggtgccttccgcttcaagctccttcacgtagcccgtctcctcgatcacctctctgagcagatccgccacaccgatatacggcagcttgctgcgcatcgtctgaataaacgtcacaaacggcttgattttcgctgcactcttgccaagggacggtatctcctccgcacgctttaaggactcgtaaaaactgatgtcgtacgcctccgcataatcggatacacgatttagcgtcgtcgcaccaattccgcgcttcggtacattgatgattcttcgcaccgccagatcgtccctcgcattgtcgatcgtctttaagtatgccagcagatccttgacctccttgcgcgcatagaaattcacaccgccgacaatcttgtacgggatattggacacgataaaacgctcctcaaacagacgggactgtgcattcgtgcggtaaagcaccgcgtagtcgccgtagccatactttccgtcccggacaccggacgcaatatccctggcgacataatccgcctcctcgtaggcggtgtcaaactgctcaaagtcgatcttctctccctcgccatttgccgtccagagcgtcttcgcctttctgccgacattgttggcaatgacgctgttcgccgcatttaagatgttctgcgtcgaacggtaattctgttccagtttaatcgtgaccgcatccggaaaatgcttttcaaaatttaaaatattatagatatttgctccgcggaacttgtagatcgactgatcgtcatcaccgaccacacacaggtttttgtatttgcctgcgagaagacggatcagctcaaactgcgccgtgttcgtatcctgatactcgtccaccatgatatagcggaaacgctcctgatagtaggcaagcacctccggatctgtctgcagcagctctaccgtctttacgatgagatcgtcaaaatccagcgcattattcttctgcagcgccgcctgatactcctggtagacctgcgcctgctttttctttgcaaaatcactcgatgccgacgcctgcagggcaaactgcgttgggcttacaagctcgtcctttgcagaggagatcgccgcaagaaggctgcgctccttgtagatcttggtgtcaatattcaggcgcttgcagatctccttcatcacactcttggaatcatccgaatcatagatcgtaaaatttgtgtcgtatccgatgcggtcaatgtgtctccttaaaatgcgcacgcaggtagagtgaaacgtcgacacccagatgctctccgagccgtatccgaccagcgcatcgattcgctccctcatctcgccagccgccttgttggtgaacgtgatcgccataatattgtacggattgacgcccttttcctcgatcagatatgccgtccggtgtgtcagcactctcgtcttgccggaacccgctcccgcgagaatcagcaccggtccttcggtggtcataacgccgagcttctgctgctcgtttaatgtatcataaatactcatgcctgtttttccttttccgtttatagtgatatgagaaagtataacacatttctctctgtttttcgataccatacagaacatattttctatttttcatgctgggacactgtcatatacatttcccaacatttgtctcttgtcatctggttttgaaaactatataatgtgataagaggtgacgcatatggacaacgatacaaaaaaatttctgagtgatctgttagcagaattacagagaattgattatgtcagaccggaagatattccgaacattgatttatatatggatcagattaccacatttatggattcccagttagagacatccaagcgacatgcggatgacaagattctgaccaagacgatgatcaacaactacgccaagaacaatcttcttcctccgccggagaagaagaaatacaccaaagagcacgttctgacgctgatattcatctactatttcaaaaatatcctaagcatcagcgacatccagagcatcttaaatccgatcacggacaagtatttcggaaaagacggcagctacagcctggaggacatctaccgtgaagtcttcggactcgagcatcaggagacacagaatctcatgaaggatctcgccaggaagttcaacacctcctgccagacattcccggatgctgccccggaggacgccgagcttctgcggaacttcagtctgatctgtatgttaagctacgatgtctatgtgaaaaagaccatcatcgagcgtctgatcgacacgaccacatcggacaagtccaagacggaaaaaaacaaaaaataatcgaaaaagccacaggcacgggcaaaagttcccgttctcctgtggctttttttatctgtctctactgcttgtccgtattctgcatgcggctaaataccatgtcatagccgtcatttccataattcagggatcggttgacacggctgatcgtagcagtcgatgctccggtcttctccgcaatatccagataagtcttctggtcacgcaacatcttggcaacctcgaaccgctgagataaggaaagcagttcatttaccgtacatacatcctcaaaaaatgtgtagcactcttctctattctgtaagctcaagatggcatcaaaaagatgatccactgcatctgtcctaagtttcttactcatgttcttctccttcttcccaaaatggattcttttgttattttagcatattaaagttttaaagtaaatacccaagtttctgtccatgcacgcactttttccactgcttgcattcatgaaatccgattgttataataatagaagtatctggaaattgcaagaactttatttcataccaacgataactggagattataataatgaagaaattaaaacaattcctgtttatttttgtcccgctgcttcttgtgattgcgattcagtttctcgcaacctactttgccatgggactttccctgctgatcgagaacggctggtactctgtcaccggcagcgcggggttcctcgatattgtagatgacgccttttccctgtggagttcccaacgcttcaacaccggcgtactgttaatctacaatgccatgtcgatcgccgtgttcggtctgtggtactactgccggtatggcggcaattaccgccccgttctgcgtcagacgtttcatcccgctgcaatcgcgggcatcgtcatgctgatgcctggcacacagtatctgacaacctatatcatgagctttgtcgcgtcgctctttccgcactggatggatgcatacgaatccctgctcgagatggcaggcctcgatgatcagatctccattctgatggtcatctgctctgtcatcttcgccccgttctgcgaggagctggtcttccgcggtgtcaccatgcatcaggcaaagaaatgtctgcctttctgggcagccaatctgctgcaggcgctgctttttggcatcttccacatgaacatgatccagggcatctacgcattctgtctgggacttgttttaggctatgtctgcaaccgcggcggcagcatctattactcgctccttttgcacatgctgtttaacttctggggaaccgtgctctccgggctcatcccgtttggtgacacgacgtttgccttcatcttctggttcctgttcggcatcgccatgacggttggcggtctggtcgcctttaacttcggcatccaaagacttcagacggccggccgcgcatccgctatgcctctttcagatattccttcaggaaccgaataaacgtctccatctcttctctcgttccgatgctgatacgcaggtagttgttgatgcgttccttagtaaaatggcgcacatagatatgctccctgcgcagcgcctcgaacagttctgttgccggcacgcgctcgtgcgaagcaaagataaaattgctcatcgaatccccgaacgtaaatcccaacgcccgcaattcttttttcgtccactctctcgtctcgatgatcttttttctggtctcctcaaaataagcacggtcacggatcgcctccacaccgagtacaagcgctgtccggttcatcgtataagaattaaacgaatacttcacgtcattgatataacggatcagcttcgcatttcccatcgcatatccgatgcgcattcccgccatggaacgcgatttggaaaatgtctgcacgatcagaagattgtcatatttttcaatcagcggcagcgccgacacccctccaaaatcaatatacgcctcgtccaccacaacgatcacgtcgcggttgtgcgcgatgatgtcctcgatcttatcaagcggcatcagaatgccggtcggtgcattcgggttcgggaatatcactccgccgttttccccgtaataatcctccacccggatctcaaacgcatcatcaagcgctttcgtctcatacggaatgcgcagcatatctgcccacacatcataaaaagaatacgtaatgtccgggaagaaaaccggctttccggaattaaagaatgtcagaaaaatcatcgccagcacatcatccgaaccgaccccgacaaatacctgatcgctgcccagtccataatatgacgcaatcgcatccacaagcaccttacaggtcggttccggatacaggcgcagcgtatccgggttaaatccggcaagcgccctctgcacccccggcgcgggcggatacggattctcgttggtgttcagcttgatcatccgctccgcctgcggctgctcccccggcacatacggcaccacttttctcacatatgactcccagttctccatcctttttcctcctacttttccagtccgtacactgccgccagcttcgcaaatgcaggcagggaatgttccacggtctcatgggacacacaatatgcgagacgcacaaatcccggacagccaaatgcgcttccctttaccatcaaaagattaaatttctttccctcgtttacaaattcttcttcgttttccaccggtgacttcacccacaggtaaaacgccccctccggcttgatgcaggtaaatccgagctttgtcagtccttcgtagagtctgctgcggttctcatcgtaaaacgtgacatccgtcttctcctcaaggcagcgcgccacagctttctgaatcagggacggtgcgttgacaaatccgagtgtccggtttgagatctcaatgccgcggatcagttcttcggcgtccgccgcttcatccggcaccacgacataaccgatacgctctcccggaagggaaagggatttggagaaagaatatcccaccagggtattgcgataatatttcgtcaggaaatcctctttgttcccgtcatacaccagctcccggtacggctcgtccgagatcagataaatgtctgttccaaattccgcctgctttttttctaaaatagctccgatctgctccatcgtctgtggcttgtagatcacgccggtcgggttgttcggcgtattcacgataagcgccttcgtccgcgcggtaatctttgcctccagatcggcaagatccggctgaaacgtctccagattcggctgtacaatcacaatctttgcatcaaaattcgccgcatactggcgatattctccgaagaatggtgcaaacacgatgacctcatcgtccggatcgagaatcgtcttaaaaataatgttgagcccgcctgcggcgccgactgtcatcaccagattgtgtgccgtaaactttgttccgaaacgttcgttcaaattctctgcgatcgcctggcgtacttcctcatagcccgcatttgccatataaccatgaatgcccagagaacctgccgctccctttgcatccgcctcatccagaaggtcacggatcgcatcgtttaacgccttcggcgccggggttgccggattgccgagtgagaagtcaaacacattctcctccccgtactttgcagccatctccctgccctcattgaacatggcgcggattgccgaattgccctccagcgctttttgtattctctttgataccataatacctatcctcttttctgcggtctgacccgcatcgttttctcattcctttactttaccaaattaccacgtgaaagtaaacggtcatttgcaaaaatttgctccatacacaagtataacacatttatcgggaattgaaaaaaagaacggacaacttccggggaaaaaatccccgtcccgtaatccgttcttttcctctctctatttctatgcgttcaccgtatccacaaagcgcatgaaggctgctctgccctcttccgtgcacttgtagactcctgcgtcggtgagaacctccttaaataccagaccgatctctgtctgaacgatctcatgtaacctctccggtgtgatctcgccctccagaccgctgccggcggtaaagccgtactttggaagaaattcctccacccagtctgcatgcttcgccagcttctcgtccgcacggatgtcaacgccgtccaagatcgcctgctccagatccgccatctcatcctttaagcgtgccggaagaactgccagacccataacctcgatcagaccgatgttctccttcttgatatgatgaagctttacatgcggatgatatacaccgagcggatgctcctctgtcgtaatgttgttgcgcagtaccagatccagctcatacgcatcgccgcgccgtcttgcgatcggtgtgatcgtattgtgcggctcgccgtctgtctcggcgtagacgaatgccgcctcatccgtgtagcctctccatgcgaggagaatcttgtctgccagatcgatcagacgatccttgtccgtagcgctgatacggatgacagacatcggccattttacaatgcctgcctttacatcctcatatcctttgaatgtgatctcgcgctccaccggtgcctttgccatggcgaactcataatgaccgccctggaaatgatcgtggcttaagatggatcctccgacgatcggcagatcggcattggaaccgacaaaatagtgcgggaactgctgcacgaaatcaagcagctttccgaaggtagcgcgctcgatcttcatcggtgtgtggtttgcgttgaacacaatgcagtgctcgttgtagtaaacgtacggagaatactggaaaaaccagtcgctctggttgatggtcaccggaatgatgcggtggttctgtctcgccggatggttgatacgtcctgcgtatccctcgttttccttgcacagaaggcatttcggatagccgctctgctttgctaacttcgccgccgcaatcgccttcggatccttctccggcttcgacaggttgatcgtgatatccagcgttccaaactctgtgtccgccgtccatttcagatccttcttcacgcggtatctgcggatatagtccgtgtctctggacagcttgtaaaaataatccgtcgccgcctgcggagactccttctcataaagatcatagaaacggcgtaccacctcgctcggtcttggaaccagcatgctcatgatctttgtgtcaaacagatcgcggtatgtaatcgtattgtccggaatcagcatctgctccgccgcgtaatcgagcatctctgcaaggatctgtggcagcgcctcctcggcgctctcctgcgtcatcggcgtgcgcttctcataagccgccgtgacttcatcctccagttcgtcaatgtgaaacagctccagcagacggttgatcgtaaaccgtttatcctgcggctctatgagtcccgtcaccagtccgtattctgtcagttccaatattctttcctgtatcatgatccaacctcgtttctaaatatactctgtcactacgccaattttaccgggccgtcgccgatctctacgacatagaaatctgcggcatagccaatcttgttcttataggcggttccgaccttctcgataaacgcatccaccgcgtcatccttcacgatgctgaccgtgcatccgccaaagcccgcacccgtcatgcgggaaccgatcacaccgtcgatcttccatgcttcctcaaccagggtatccagctcgattcccgttacctcgtaatcatcacgcaaagatacgtgggagtcattcatcagctttccgaacagcgcgacatcgttgttctgcagtgcctccaccgccttgatcgttctttggttctcatatacggcatgttttgcacgcttttggcacaccggacttgtgatggtatcctgatactgctcaaactgcgcttctgtcagatcgccgagcgcgttgatctttaccactttctgcagttcggcaagcgctgtctcacactcactgcgtctctcgttgtatttggaatcaccgagtccgcgctttttgttgctgcaggagatcacaatcttcgcattctcgagcctgatcggcgcatactcatactttaaggtcgccgtatccaggaaaatcgcatgtcctgccttgcccatcgcaatggcgaactgatccataataccgcagttgacgccgttgaacttgttctcggaatactggccgatcaatgccagatcctgattcgtcacatcaaagccgaacatatcacgcaggatgaatccggtcagcacttccaccgatgcggaagaagacaatccggaaccgttcggaatattgccgaacagcacgagatccataccggactccactttcatgcccttctcgccgaacgcccacatcacacccttcgggtagttcgtccagtctgcttccttctccggctttaagccctccacggaagactccagcacaccgagattctcaaaattcatggaataaaagcgaagcttcttgtcgtctctttttctcgccacaccgtaggtaccgatcgtgagcgcacatggaaatacatgtcctccgttgtaatcggtatgctcaccgatcatattcacacgtcccggtgcgaaataaactccgatctctccctcatccccaaataattctttaaactttgcaagtactggttcccagatcatgcgttacctccttatacatcattttttctatgaatggtttctgttaccgtcctgttgtaattctattataacgtctctgtgttcctttgcaatagacctttttcaaactgcaacataatcaaaaaaacatgcaacaaagttgcatgttttttccacacttcacattggcacttttcatttctgtgacaggtgatattataaaaagcacctcctgcagctttcagctggaatgcctatggaacattctgttcaaaaaatgcggcatttctaaccagccggcgactgcatctgcgatgatccttgtctttccaagtttggagcactccacggactgtgtccgcaaatcatgagacaatttaggaacttccgtgcggcgctttgcgcgtttccgaatataacataatcgcgcgaactgatgtctgaggtggcttctgccttgtttttaatagcagaagccgccgagtttcagttcgcgcgattttataatgtctatgaggaaacgcacattagcgccgctaggaagtccgctcattgtctctaatttgtcggacacgctccgggagagtccaaacgtggaagagacacggaatctgatgcaaacttcggctggaagaaatgctcacatttttctcccacgaatgttcccttttcagttccagctgaaatcgcaaggcgtgccatcttatcatagaacctgtcgcagaaaggaaactgcctgctactttgctttgcgcgctgtaagctccgcaacgttggaaagcaccttctttttggagagcggatacaaaaagagtagtgagcatgccagcagaacaaatccgatcgccgggaaaagagtcgtcacgttgtagattccgtttacgacgtcctcgtcaaatgcggttgcggagctgtatcccactatggtgagaagcagtccggtcagaccgttggctgctgcctgtccgagctttcttgcgaaggaatagacggaataaaccgtaccgtcgctgcggattccttttttcacctcaatgtcatcgatgacatcgatgatcattgcccagcacatcaggttgaaaaatgccagtccgatgtaagcaaacagatagatgcagatgaagaccaccacactctttgtatgtacgatgtatcccacaaacagtgccgccgcgccgataaacgcaccggccgcggacagttccttcttgccgatcttatccgaaagcttggtcacaaatgtggagagaaccagtaccacaacacatgccagaaggctgctgacggagattgccgccgagctgttgaagtagttcgggtaaatatagttgttcattccggacagtgtcatctgtaccagcaaaaagatcagcgcggagatgacaattcccacaaatgcgcggtttgtaaataatactttgaaaagctcaaatacgtttttctgcccctctgcactctgcatcttcacacgctcggtggtcagatggtagcagatcatatagacaacgactgccagaacggagcatacggcagatgcgatcatcgtctgcgtgcccccgagcaccttgtgtccctcggcatccgttgtgtacacaaccatcggaaggatcaccgcaatcacgatctgcgccacggtggcaccgatggttctccagtttgagagcatcgtccgctcctccggcttatcgctcatcgcagacgccatggaaccgtagggaatgttcacgccggtgtagcacacggaaccccagagaatgtaggtaaaaaacatccagaataccttaaatcccatcggcatatcggcaaaatacggcgcgaagatcaaaaacgaagccacggcgaccggtccggcaaaacggcggatccacggtgcaaattttcctttcgccgtgtacggactgcggtcgaccacctgccccatggcaacgtccgtgaacgcatccactaccttggcaaccatcatcagcgttccgacgagcgcggcgctgacacccatgatgtcggtgtagaacttcatcataaacagcgcggcaatcacaaaagtgagatcatttgcaaaatctcccgccgcatatccgatcttatccctcatgccaaacgggcgctttgcattttcttcaaatatggcaatatctgccggattttcttttcgcattgtactccctctccttcttctaatcatgcagcatccagtctaaaatatgctggatatactggtcccagaaattccagtcatgaccgcctttgtcctcctcgtaggtcagatctgcctgtttctgttccagcagctttctgacatacacattcgacggatacaaaaagtcatcgcgcccgactgcctgatacagcttcggcacacagccgttctttacatccctgtcatagagcgtaaacagatcataatcgctcccggcaagtttgtccggatccccaaagcaatcctcccaatgaaacggattgttgtcgttgttcccggctgccgccgcctgatacagtcccgcaatgtccagcgcgccggacatgctcgccgccttcgcgtacagctccggtctggacagtgccagataccacgcgccgtaacctcccatggaaaaaccggcgataaacgtcttctcccgctccctgctcaccggaaatacattgcggatgaagagcggcagttcttccgtaaagaaggtcttgtactttttcccgctccgaagatcctgataaaaagaattttccgcggatgccatgacaaccacaatcccccggtcctgcgcatagcggtcaatattgctgtagcgcacccaggaaaatgcatcgccgtacgctccgtgcagcagatacagcaccggaagcccgttctcgtaatcgtacttcgcgctgtgccccatctgtgtgatctgttcactgctgcccggcgttggaacgaacacattcaacgtaatattgctccccagggacgagctgtaatagtgtgtctccatcaatgccattgcttttccccctatccattcttgtctttgcagttatggtaccaaaataggaatagcgaaaccacaccgtttttgcttaataacgtctgtttttttacatatcctgctattttttctcatttttgtagataatttttacaatttttattataatcagctacagtttttgtaactattgcctatacatattccgccatagttgtagaaatggatcgaagaaaacagtgagccacgacacagcaagactcgtaaaggaggttttcattatgaagtatcatgatatcacaccagagatgaccatcggtgatctggtcaaaagcaaagtctacggggacttcggcacccacatttttaccgatatgacaccggatcactggaatgcaccattagcaagctacgggtttgaaaaagtcggctttgtaccgaccttacaccgcatggaggaactcgccgccaccggaaaaaactatctctatccgctctattccgaggaggaacgcatgagtgagtgggacaaggagtctcctgccttcctgcattttccgggtcccatcgccggacgtccctacgccgtgatcatcccgggcggcgccttcaaccgccagtggggactcgtggagggcatggcgatcgccgccgccttaaatgagatgggctacaccgcattcgtccttttctaccgcacgaagcaggacgccgtcgtcgccaaagccatcgaggacatgtacgcctgcataaggcagattgaggcgcgtgccgacgaatttgaagtgcaggcgggtcactacatgatcggaggcttttcggcaggcgctactttagcgggcgagatcggctccaccaatttcggctggaagagcgcaggcgttccaaagccggaaatgatttttcttgcctacaccgcagtccgcatgaaggatttctatgcaggctacactgcgttcccggcaggtcatccggtgcacgacggggcagccgcttttctgcgccgcgtggcaggaccggagatcacaccggaagccgtcgaaccgtttgaccttacgagccacatggatgcatcgtaccctccggtctacctgacagcaaacgaggacgaccacaccgcaccgttttccaacagcctgaccgttgcagagacctgtgaaaagctcggcattcctcacaaaaccagattcggcaaaaccggagaccacggtttcggtctcggcatcggactggaagtcgagggctggcttaaggaagcagtctccttctgggaggaagtgcgctagcgcaggagaccgcatgcgctatgaataaccgtatacgaaaaacagggcgcggaattcactcattttacgagtcgaattccgcgccctgtttctgtgaagcgctccccggctttttcattgctctttctgttatgccgatggttacacccatctctcgatcatcgctccggcatgatcaacttcacttccatggattgccagcccctgcgttaccgcagcgcccgctgccgccttctcaatatctgctactgtaccggaaaggccgcttccctcgtatgcgtcaagcgactccggcagattcttcaccttcggtctcgcctttgccttcaggtcacgctttgcctcagcaatgcaggtatcataatccgccgcatacggcacctcctgcacaatctcaaacaggtctgcaccggtcagctccgcaatcttttcggcagcctttttcgtgtttccctccgagatatatttcttcgttccgccaaaataattttcatctgctcttgaataaaatgcaaccaatttcgccataatctgtctcctttctgatgaagacagagtaaaccctggagtttactccaagtcaagtgttttttgcgggcttcgttttttaggctgcgtcgggctttccacatggcggtacataacagacagcacacccacaggctccccttcatattctcctactcttccacattctttaagctctccgccatatccacgcggtgtattttccttccggacagggccagcgccagaatatatgccacaagcacgaacacaaatgccgcaagaatcgtttccgccctcaccggcaggctcatgcgcattccggaagactgcgccgatgccagcaccatggaataggcggtcagatagccaagcggtacgccgatcacaaaaccgaccggaaccagcagatgaccggacgaaagcacaaagcttcgcacttcccgatcccggtagccgagaatctccagcatggaaatattgcggctgctctcctctgtaatcatgccacagatcatcacgacaatcaggatacagatgcacacgccaagcactttcaacagtttcagcacaattcccgcggtcgacgagagatgttccaccatatccctgtaatcctgcagggaagaggatttcttcaacagttcccccggtatcgcaagcttctccctgctgataatgacattgtattcgtccgccggtctctcaagaatcgcagccgcattctcttttcccgtcagcaccagcgataaaatatcatttttcacaatgccatcgatcacaacctccgtctcctctagcgtgaccgtgttgtaaaagcagaaagtatctcccgccgcaatcccgtagcgcgccgcggcagcacttgtcatataatactttttgccggagagcggctccccgtcctcgctgcaaagatcggcaaactggttctcgtcgtcaaatccgatcagattaaatctagaatcgtccgcctttgcgccgaagctcacatcaaaaacagcatccccaccataaggattgccatccgactggtaggtgttgaatccgtattcatactgtccgcccagcatcgcgtacggcactttattctccagcagatccgcataggcatcctggaaggcgccgccgagcacaatgcagagcgttgcaaccgcaataccgatcacgagcgtaatgctgcggaaccggtttacgcagactgtccggatattgtagatcaccccgagttttgcctgactgccgtttaagatccgggatgttttttcttggtgaatcccctttaagagcgggataatctcgacttttaataccccgcagagcaccaggtaagacaccagcccatagaccactaacggcaggagaagcgccaccgctaaaagcccccagggaatctttacctcatacgcgatatattccgcatctccgaaaaagaatccacagaacatccttgaaaaaggaatacaaaacagcactcccagaatatctcccgccactgccggaatcatgccatatgccatgtaatgccggatcagctcggatttccggtagcccagcgccatcagtgtgccgatcgtctttccttcccgccttaccgtgcgcgccagaaccatcgcaatcacggcgatcaccacaatcataatgatcggacaatacagggaaaattcggcggacagattatccgcctcccggtacatcaggctgatgcgcgagtttgcactgcgctccagatactcgatcgtctgatatttttcgtaaaccgttttccggaaatctttttccaggctctgatccttgtaacggaccgaataaaataccgtaccgccgagactctccatcgcatcctttcctatgatgccgatgccgaagccctccttgtcagccgcactctccgaaagatcgtaaagcatgatcgcatagtccggcttcatgccaagtccgcacacctgaaagtcccgtcctgccagatgcagcgtatctcccactgcgatgtgattggctttcgcgtaacgatacgtcacgacgatgtcatccgccgcctcgatttttcgtccctccgacaccgtgtacagatccagcttctccgtcgcggcaaaaagccgcagtctggtaccgtcataatccagatccgtatactgctgcctttccagcgtcacatcatacgccttctctaacacttcccgttcctcctccgggatctccgtcatcgtcacaaacgaggcatcctcaacccgggtctcatcaaaatacggggtaaaacattcgtagatcgaatggctcacggcaaatgccccgaccaaaagcatgatggtaatggcggtcaaaatgctccccgtcaggtagaaagacaaattttttcccacacttctcgctatttttttctgcaatgtcatcagatatccagctcctctatgcgtaccttttcattctccgtgttgctctttacctttccatcatgaagccgtatgacgcggtccgccatcccggctactgcctcattgtgcgtgatgataatcacggtcgtatgatatttccggttgatctgctctaaaatagcgagcacctctctggcggaagcggaatcgagcgcgccggtcggctcatcacacaacaggatcgcgggatttttgatcagcgctcttccgatggcgcatctctgctgctgtccgccggagagctccgacggaaaatgcttcgcgtggcgggaaagtccaagatcttccatcagttctgcaagtgcaaggggatgttccgcaatgtccgcaacaacacggatattctcctgcacggtaagctcggcaatcagattgtaggactggaacacaaccccgacattttttctgcggtactctgtcagttctttccggttttgctttgcaagctccacaccctccaccgtaaccgttcccgcatccaggcgatccagcccgccgatcatattaagaagcgtgctttttccggagccggatggtcctaaaatcacacatacctcgcccttttcgatccgcaagttgacatgatccaacgcgcaaatctcactttcacccctgccatactttttgactgcatccctgatctcaatcgccatcgctatttttcctccctcatccactcgttgattgctccggtgatccggcgctcaatatccacacgcgccgccttgcactccttcggatattttcttcccgcggcaaacactcttgtaatcaggtcgcctccgacaggcagcatggtcttcaccattccctccgggaacacgaaatgtgtggcatgctcgtagataccgctttccacctcgcaggtatgctctctcgccgccagtcttgcctccatccggcggatatattttaccgtgtcccacaaaacgtcatccttggcaccaatcaacagaagttttcctttgatctgctcgaccttgatatattcctcctcccgaatcggatgcgccgcctctgaatcccggaaaatatcgagcgatgcgatcatatctttgccgcgcttcgcctcctcttttatcttcctgccgtattccggatggcggtatgcatacggcagatacggcagcggctttccctgccaggagacgctcgactcgccctcccccggccattccgtctgtccgtcgcgttttccctgataaaatccctccatcacgaaatctgccggcgtcatggcgatcgtcagcgtaatctccgggtaataggacgctgcaatcagcgcatacattcccgtcgtagatgcgccggcgattgcaatctttttgataccgcgctcctttagatatgtaatcgcagctccgatccgctctaccggcaagttatggtggctgtagtccttatgcccggggcttaatgtgagcatgctaacgccatattttttctgcatccactttaccgccatcttcgccatgtaatcctcgcagtcatcccccagcatggcaatgatcgcacaggtacttccctccagcggccagtaacagccataaaatcccttttgtgtctctttgattttttccatatactgctcctttcctcctgctcccgctcaggcttcaaaaatcagatcaagaatcgtctcgatttgtacgcgcaatgtctcctcgtacaccgcctcatgcagctccacccgcgattcgaccgttatgatcagcaccttgcacaagttggcgacaagccccagattgacgtcggcccgcacatgttccagatagcttaacagccccgccgtgatcgcgctctccttttccagatccggaacaaatgcctttgtcccggaaaaaagctttgcctcatcctccagcgtcatgtgcggataaatgctgatcttctcatcgatgaccgcgtataaataccggcgtgcatcctcccgccccagctttttcttacccgtcagggcatcctctccgatcagcactggcatcagcttccttctgtgatacccgatcagatccgccatgtacgcttccttgttcttccagaagctgtagaaggttccgaccgcgatcccggcggcttgcgtgatcttcgccaccgatgtatgcgtcatcccgtactgcttcagcagagggaatcccgcctccagcatctgctctctcaagttctctttctcttcgtccgtaaaaatgtgtgtcggcatgctccatcctcgctgtgaatatttttataaatcattcatataaatatgttagtcttacctaacctatttgtcaagaacgtttacatattttttgatccgaatttccagatgcattccatcagaaatcgaagggcatgatcttcttatcctattacttatcacatcaaaacggggctacccgtttcatgcggcagccccgttttttatacttccggtttaaaatcacggatcagtgaaagtgtcggcagtgcgttgccatcgtagtcaaacagcgcctgatttgcccactcgtttccacatggtcccggatcgttcatgtattttaaggatgccggtgttgcccagccggagcccggtaccggaatccatgccggctcccagtagaagaatccctttccttttccgcctttgatgtggctgatgcggttcaagaaatcctccatgaaatcgtactgcccctgctttgtcatcggatattcgatcttctccacaagcgccggtctggtcgcatatcccttgcgctcttcatcggaaagcttctcgtaattcttgtagtcttccatcgtatagcccatggaaacctcggcaatcaccagatccttgccgtagcgctctgcaatgtcattcatgttgtcgtttaacatctgcagtgatccgtgccagaacggataataggaaagtccgataatctcgaaatcctccccccgctttgtaaaattgtcgaaccactcgcggtacagcgcattgtttccgccgttatccagatgaatcatcaccggaatcgccgcatccgctttccgcaccgcacgaattcccgcattgacgaacgtcgcaatattgtcatagttcgggacttttccctccggccagagcagaccgttggaaagttcatttcccacctgcaccatggtaatattgacgccggcatccaggaatgtctgcatggattccagggtgtaatcatagaccgcctgctccagctccttcacaccgtaatctgcccatgccttcggcttgatctgtttgcccgggtctgcccagaaatcgctatagtgaaaattgagaagcacgccgaaccctgccgccgtcacacgctttgcaatctcaagagaagttttcaaatcattctcccctgcgccgtaagattcgccggtctccgaccacggatcattccacagacggatacggatggtatcaacgtcatagctcttcatgatcgcaaggagatcccgctcctccccgttatcgtaatactttgcaccacaccgctccagttcgagcagtgtggacagatccattccttttacaaacttcatatgcctcttcgcgggcacagatctcattccatgcccgctctctcctttctgtttttttatattccacggaaaccgaaccgcagtgtcagaggctttgtcacatcaatgtgatattccggatgaaccggagctccccagctgtcgtctccgccgatgcccatctgtgccagtgccacacggacaaccgtgtaatgtacctcaggcagttcatacgcatgcattgcattttccagttcatgcggtgtataaggcagtgcggaaaatgacagttcgtctccggtaaagagcatgcctcttcctcttgcatccgtcaccttcgcgtagcgcacgcctactttgttgccgcactcctgcggtaccagatactgcgccatattatccgccacgcggttcttatatacaccgagcttcgcgccgcatctgcggtccgcatacgtctcctgcggtccaagtccgtaccactccagcctgtcataatccgcattcagcttaaagagtattccaaattccggcatatcgcccagctcctccaccgggtcataggtcagctcggtctgcacatacgcatccggcgtcacggtgtaggtcacgcggcattttgcctgcggcgtggtcgggagcagataggtatacgtgatggagacgctgttctcctcttctctcacaaccggttcctcataatcaaacatgcccttgctgctcatgccggcatacatactcgcgatcttccactgcgccatccgcccctgcatgcggcttccgcagtcattgtcaatcggcgcacgccagaaattcggcatcggtatcttctcaatcagctcttttcccatgtagcggtaggacaccagtccgcagctgttgtaggaaaacagtacgtcaaaattctctcccttcacccccagattccactttccgcggatgatctgaagtcccgccttacggttcgtcacgcactttccttcatattctgccgcggcatcgccgattgtcccaccatttgcaggtgattttgccgcaaaaatcttctgaccgaacgcgatctcatgccccggctttgcccagagcagttcttcgcgcagtacaaacgatacggtcagtgcgtattccgccccggcttcctttcccgcatgttccagttcatcggcaaaagccatgcagccctccagttccgccagaacaaacgtcttttccgagagcggtgccacagacagcgctatttttctgcggcctgccgccacgccgttcttctccagcagaaggatgcagtcatactctgccgtatcggtaaacaggtttttattttttaccgtaaaaccatcttcggtaaaggatacgctgatgttctggtaattgaattttacttcctgcatcttcggtgactcggcgcgcccctttgcatagcagatgccgttgccgctgaaattatagtccgtcggccgctccaagaaatccccgccgtacgcctgaaattccttcccgtagcggtcttttttcgtgatggactgatcgatgtaatcccagataaatccgccctgatagcgcggctccgtgtcggtcagatctgtgtacttgtgcattgcgccgcaggaattgcccatcgcgtgcgtgtactcacagcagataaacggcttctctttctgctctgccagatttttcacaatccgctctaccggcgggtacatctggctttccatatcgctgcttccgttgtagcgtctgtcgttatagactccctcgtagtgaaccaggcggtcgggatccagctctctgaacttctcggacatctgataaatcacacttccgccgtaggactcattgccgcaggaccagattaagaccgccggatggttcttatcccgctgatagcaggaattcacgcggtcgagcattcttgcctcccacttcggattgtctcccggcacaatcgtctgcggatccgcgatcttacgcatcgccgccgcatcccagcttccgtgcgactccatattattctccgcgatcatgtagagtccgtagatgtcgcagagttcatacagtccgacattgtccggataatggcaggtacggatggaattgatattgttccgcttcatggtcacgacgtcggtgagcgtctcctccatgctcaccacacgtccggtcagggaactgaattcgtggcggttgacgcccttaaacacaatccgctttccgtttaaaagcatcagtccgtccttcatctcgaaccgacggaagccgatcttcgacgcgacgacctcctgcatcttccctgccgcatcatacacctccatccgaagttcatacagatacggctcctccgcgctccacagcttcacatccgccacttcccgcgagacatgtaaggttccttccatcttctcctccagagcaaacacctccgtgccctccggtgtctcatagtggctctccgccagatcaagtcttccgcgctccacaagctgtatgcgcacacttccgctgccgcaggagcgaagatccagctccagcgtgccgcaggacagattctccgccacctgtggacggatcttaatgtcgcagagatgcgtcttcggaatcatgtagagatagacgctgcggaaaataccggaaaaccggaagaaatcctgatcttcgcaccagcttccgatcgtccacttaaatacctgcaccgccagcttgttctccccgtccttaaggtaaggcgtcagttcaaactcggacggcgtaaaagaatcctcactgtatccgacatatgctccgttcaaccagagtgccatgccgctctccgctccctggaacgagataaacacacgttcaccagaaaaagtctccggcaatgtgaaatatttcacataacttgcgaccggattgaacttcgtcggcatctcgtccgtccagacgtcttcccttccatcccacggatactgcgtgttcgcatattgcggactgtcatagccttccatctggatatgtgccggcacgcggatgtcatcccatcccctgcagtcgtattccggcttttcaaatccatggatcgtctgctcatagtttctcgcatagtggaatttccatgatccgtctaaaaacaggcggaaactgctctttcttccgagcggatccagccacacgtccgcctcatcccagttccggtacgccacatggtcggagtgcgccgccacgcggttctcctcgtaatattccggatcacttaatctctcaaacaaaaattctcccatactgttcatcccccaatttatgattgctgttattgcgtttgttaagttcattatagcgaaaaaatgcgcattttgtacttatttttcggcacaaaacgcgcattttccaccattatttattaccatccttttcgcgcggaaatattgtaatttaaaagctttgtctcgtaattttccggattgattttccactgatagggggatgtgtttaaaaactttttaaaattccggttaaatgtggatgttgtcgtaaagcctaccttctgtgccacaatgtccatcgaatccgtcgtctttttcaacagatcgcatgccttctgaatccggacaagattgatgtaatccaccggagacatgttcatacaggactcaaacagccttctgaaatgcgtctcactcatatgacattcctgcgccagctcctccacccggatcatgtgcatatattccatgcgcacatagtcgagtgccgccgcaatctgcgtcactcccgaatgtttctgcatttccacaccctgcacttcctgctttgcctcctgctcctcattcagccggataatctctatcacaagagaatacaacagacctctcacgctgtccgtataatggctgcgccgtccccgcatctcctccatgatctgccggacaagaaacgcgagattgtgattctcccattcatggagaaacagcgctctccggttgactttccggatcagttcccggcagaacagctcgttcttcggatacatttccgcaataatctgcgccggatcaaaaaacagatattcccagtagcttggtccttcttttgtattgctgatcgtcacatgaggatagttgttcggtataatactcaccatggcaggctgataggggcgctgttcttcgtccagaatcagtttccccgtaccgtttctgcacactccgatctccatcagattgtgaaaatgaagatgtacctcatcatgaccataatcccggatccagttttctccaagaagtgccagaacatattcattttgcggtatctcatagaaccgaagctcgatggtatctttcttctttttccccataattactccattttctccccgctgtggcagcgtaaagctcctcgccgtgacagttcgattccgcttcgcttcttctcgctgtgggctgtcgccctatagacaaaaccggctgcgtctgaaagaaaataaattttcttctgccgcagccggctttctctacactgctcgtagcttaatcaaagtcgaacttgtcgaaccgctggtgcattgccttatagcggaagcggatcatctcatttttctccaggacgtcttcttctgttcctctgtactggcagcggatacagctgtaaatacctgtttccttattgtaaaacatatcaatgtccagatctcttaaaaagcaggacgggcatctataatttaatttgcctttgccaagttgagccatgttgcaaatacctccttatctgagattgtttttctgtatcccagggtaaacatcggtgagaatgcatatccctcttttacatatccctctgcgtccgcgttggatgcagtcatggatacgcgtgtctcgatctccggaatcacggcgcttacttctgtcgcacccttgacaccctcctcgcggcacttgtactcataatggatcgtcttctcttccggtccgtcgatctttaaggtgatatgggacatatcctcggaatactcagttgtgccgtagcatgcaaccatatactcgtttaaggtaacctctgcactcgggtcactcatctcaaggatggtacgctcgatcttgatgttggaggagccttcctcaaagtactcttttgtctgaagctttacagtcagatcgcgaaactcgatcgttaccggatccagtgtcaggattcttgtctttccctcctgtgaaaaatgtgcgtgtgtcgggcagagacacagatctacttcctcacccttataggaaagcttcgcacttcttacagttccctctcctgcgtaatgtgtgaagtaacctgcacggtacttctcctgaatcaggaacggataagaggcatcctgtacatgctttgtgccgataccaaccggccactccagcttcgctgcatacggacgaaggtcgacgattgcaccgccctgatccatattgacgcaggctctcatgtacggatcacagtaccagaacagctgcttgtctgatccgtagaggatatctctccagagtgcgcactccggctcattgtagttgccggcatccacgcccttcttctcgcggtagtaatctgcgaactcggacattgtcatatcgactaacttgccctcttttttcagcttgccgtaatatgcacagccgtcgctgtaagacttgtagagaagctcatacggctgctcccagcgtcccatcttgttcatccagcccggtcctacaaacatcatgttgtatgcatagccgttgttgtattttcctaacgaacgatactgatcgatcaggttgtacagatacgggtactcccaggtctttgtatcatagatcattccacgaagtacattctgcggatgcgttccgaagttggaaccgttaccgtcatagcatgcgatcaggtcgcgggacagatgcgggattgcaacgataccgctgtcctcagccgcattggctgccggcgcatgtgtattctgcttggacgggatccacggtgcccatggaccgccgtcgaataaggtgtaccaggagttgttgcaggtatggtaagcttttgggccttcctcccagcaggtggcaaccgcacactttacggtcggataagttgccttgatatagttggtcagatcggcatccatgtagtaggaaccggttgactccggatagaatccgaatctgtcatggaacttctcaaacacatcgttgacgatggctttcttgtcctccatggagaacatccagatacagaaatccttggtcttgtatttctcacggaactcctcacacggaagtccgagcaaggataatgcgatctcgtctccgtatacgtcgtggtcatgcttcgcaatctccactgcctcgtcattgaaaagagatgcgtatgtcatctgaatggttacttttaatccattctcatgtgcgagtctctgctgtgtcttgaaaatatccagagattctgtcaaaagagccttatctccgatgtcctcttcctttccctgtcctgtgacagttgcggaatactccggaaccatctctggtctgtgaatcagatttaaaataaattgatccattttcttcctcctcaatttctatatttctttcatttttatggaaaagatgcctggtgcatcctcacccgcctaacttatgctgtttttgcatttttctgatgcgaagctggaaatactcaggcattgcagcctttgcctcagattaaaacttcatggaagaatgccgcttctgcattcttctaatgcgaagctggaaatacttcctctctaattaaaagttctctgaaaaatgccgcttttgcatttttctaacgtgagattagaaacactcaggctgcgcatcctatgatgcgctgtctgccatagtgtttcttctcacaatttatcctttcaccgaaccaccggtaattccttccacatagaacttctgcatgataacgaacaggataccgatcgggataccgaccataacgccgcccgcgcagaatcttgagaagtatgtcgggatcagagtacgattcagcatgttgtaaagtccgatcgcaacggtccagtctgtcgagataccggagtttaagatgatcttcgcaaaaacgaaatctgtccacggtaccaggaaagaactgataacagtatacacaatgatcggtctggaaagcggaagcacgatcgtgaagaatgttcttgcctcggaagcaccctccagatacgcagcctcacgcagggatgtcggaatcgtatcaaagaatcccttcgccacaaggtaacctagtccggatgcaccggagtacaccagaatcataccgatatggctgttggttaagttgacggacttcaaaataaagtaaatagcgatcatggacaaaaagcccgggaacagctgtagcataactgcgatattcatgagagcttttcttcctttgaaacgcatgcagctcattgcatagctgaccatcaatacaaaagaagttgaaatcagacatacaaaaatggcaataaccaacgtattcttaaaccagatcgggaactgtgataccgtgtccggttcaaagagcatacgggtataattgcggatcgaccatgtctccgggaagaagcggctcgtgttcatgccatcatatccactgaacgaggttacaatcagccacacgatcggcgtgatccagatcactgcaagcacagcaagcactacgtgaagcaaaacggaattaacaatttttctctttcccatcatctgaatgtatcctccttatctcctttaatcaggaagttaaaggcaaataatgtaatgactgcacatacgacaaagacgcagataccgatgacggatgccatcttatagttgtactgctcactggtcagacgatacaaccaggtaaccagaagatcaatctccttaccccaggaagccgccagtttctgattggtcgttgtgtaaatatcctgtgtcagcaggtaaattacattaaagttattgatgtttgccgtaaactgtgttacgaggtaaggtcctgtgataaacagcatataaggcattgtgatctttcggaaaatctggaacgagtttgctccgtcaatcttcgcactctcttttaactcttccggaatgttcataagtacaccggttgcaatcagcatcagataaggaacacctacccagatattgatgacaacgatcgtgattttcgcccagaccggatcgctcaaaaacggaatataatttgctttgatccagccaagattctgtaacagatcaaccagaccgatgttcttgcagaatgaattgacaattcctgtatttgcgaaaaagttacgcagcaacagcaatgttacaaactgtggaacggaaatagctgcaacaaaaagcgttctccacagcttttttaattttgtgttcttgttgttgatcagaagggcgagaataattcctccaaaataggtcgtaaatgtggcaagcactgcccagagcagcgtccatcccagaattctccagaatgtatatccgaatgtggaggtaatgctcgtggtaaacagggacttaaagtttgcaagtcccacccaggtaaacaatgcatttggcggcatatgactcttatcatagttcgtaaatgcaatgcagatcataacgaccaacggcatgatattaaagataatcacacccagaaccggaagcgccagcaacgtaaaatgaaacttatcattcagcatctcattgcagtcttccttaaatgtattgatgtgctttcccgcttcagcgcgaagctgtaagcggtatgtatttctcacgtttgccatccaaagcaggattcccacaatgagaaaactcagactgatgacaccgaagagcagaatcagaagggagttatcataatcattgacctcattcttcatcgttgccgggttgtacaccatcgcacgctctaccgtacctaaggtattcagctggctgatatatggcaccccgatcaataccgtatatagaattaacccgatttccagtaatgttaccagaaatcccttgatgatttgttttcttttccaataaccggcacccgctacgagcagcgatgctttcactgcaccgtcccctttggcggcagcctcaccaaattccttaaagaattttccgattgctccgaagaatgcagccaccggattctttttactttccttactattcatgcaagcacccatgcctttccataaccgtcattttctgtaaaatggcgttctccttgtatctttgctgcacgcagtgtatacctgttctgcgtgttctttgggttctgttgatattcagatgaagaaaaagacccactcacgattcccatcttcgtatgcgggcctttttctcttcatacactcttataaaatcgtgttactgcttattctgtcggctgtgatgcagactctaccagattatccagcaatgtctgtacatctgttccgtccgggttaccctgagcaatgatctcaccaaatgctttggacggatcccagtaaccgctgcctactatctgaacaacaccgttagcaccattctgtgcggtaactgcagcgattgctacatttgctttaacctcatcagactcgccagctgcaatgttggacggtccgatctgtctctcagcaaaacgtgtctcctggctctgctcgttggttaagaactttgctaattccatagcccagccaacctgtgcagagtttgcattaacaccgatcatcttgtaaccagctgcagaacccatcggaacctggttgccagcgcatgtataagtcggaagtgcgcatgctgcatatccatcaccgaatgcttcctgtactgctgctgcatcccatgtaccggaaacgatagcaccaagctcaccagttgcaatctggtttgctgtatcaccgtctgtgattggtaagaatgccgggtttgttgcgattgcaagcataccgtctacaacatcggtacctttgataccgtcagcagatgttccgttccagtccattgctgtgcttccgtcatcatttaatactgttgtaaatcctgctccgtagaagaaacctgcattgtaccagccgcttgcaagcaccattccggctttcttgcctgctgctgcacagtctgtaaggattgcatcccagttggtcggatctgttacaacattgctgtcataatataagaagtatccgttatcagcagacatcgggtaagcatataatgtaccgtctacggtagctgcctcaacagcacctgctacattctggctggagacagtatcaacatcctgtactgcctgtaatacacctgcatctacaagatcaatcagctgatcacttgcgaatgcgaatacatcagctgctgctgtcgggtcaactaagatatcatccttagcatttgcctcagactctacaccaactgtaatgtcaaatgtctgatccggatttgcttccttaaactgctcaataagctcgttggttaatgtctggtcttcctcagcggcccatactcttaaagcaatggtgtctccgcttgctgcaggagctgctgcttcctcagtacctgctgctgcgctgttgtctgctgcgctgttgtctgctgctgcattgctgtctgttgtctcgctgctgcttccgccgcatccggctaccatggttgctaccatgctcgcacataataatgcgctcaaaacttttttcttcattttgaaaatcctcccttttctttttcaaaactttttcagaacgccgcatgcccaattctgtatcgtacctgcggtactgcgcatctattgcgcaatcggttgttctatgattaaagtatattacgtgcctgttttgatgtcaatgtgtatattttataataaatttgcttcttttttggcacaaatgcacaagttttaaaaaaatatcagcttttcgtggaatcattcattatttttgtgcaaccgataaacccgaatattccaagcatattccactgttttctttatattttccaacatttcaagcgcatattgagcgattttgctgattttcccattccctgcaccatttccggcgtgtcagacaccgtattccgacacaatccgcactgcccggtgtgcactatttcgtggattccttgagtacgacctcatatggaagtaatgtcttctgctttacctccagtccctccacaagatctaaaagcgtccggcacgccacttttccaagttccttggcatcgaaagcaagcgaagtgatcgacggcacatggttctcgagaatcgtgctgtcataaaaagatgccacccgcacatcctgcggcaccctgacgtgctgttcccgcagtacctttaaaaccctgctggtcaccgcatcgtccatgcacagaatgcagtccacattctgttccaggatctcctttaccgtccgatcgacgcgcacccggttttccgggcttaaatacagcagattctcatcgagcgtctccccctgctgttcataggcgtcccggaatccgagcagacggctgtgcgttaccatgtatccctcgtcctcgccgatcagtgcaatccgctttaaattcttcattaaaataatggatgtcaattcccggcaggcacttctgtggttgtggtcgatctggattacaccctcataattcgtacttcctgtcgtcacaaacggaatatttttctgctgcaggaattcaatctgtgcatcctccagaaaggtacgcatcagaatcacaccatccaccttatgatttgcaacaatccgctccagcgaagaaatatcattcatctgacacatcgtaagcagaatgtcatatccgaccgtctccgccatctcctgaataccgaataggcagcgctggaagaaattccagtccaccacttcataatcgcgcggcatcaccacacagatattgtacgttttcgactgtgccagtcccttggcgatggcgttcggcttataatcgtgctcctctatgtattccagaaccctcttgcgggtctctttcccgattcttccctttccggatatggcgcgggaaaccgttgtctttgaaacccctaacgcctccgctacatccgcaatggtaatatcttttttctcttccttctccatagtaacctccaaccccggaccatcgtccggagttcccctttattttgcgcttgttgcgcaatctttttttattatcaaacacaattccggaaaaatcaatccccttttttaccaaaaataagttctcattttttgcagtatttacggtactttctgttgtttacagtccatttttgtgatggtataatgaaaaagcgcaaacggttgcacgtttttgtgtgccgaaatgcgcaaaacagctacttcttatagaaaattttagaaaagattggagatcacccgatatgagaacagatcacctgctctttggagcagcctactatctggaatatttgccgtatgaccgtctggagacagatatggaaatgatggagcgtgccggcatgaataccatccgcatcgccgaatccacctggagcaccttagaaccatccgacggcgtctttgactttacctgcatcgaccgcatggtacaggccgccgcaaagcatcatttttccgtcatcatcggaaccccgacttacgcgataccaacctggctggcgcgcaaatacccggatattctcgccgtcacagcaaacgggcaggagctctacggtcaccgtcagaacatggacatcacgcaccccggctaccgttatcacgccgagcgcatcatccgcgccatgatggagcacttaaaggacgttccgaacatcatcggcttccagctggacaatgagaccaagagctacgggacggcaggtccgcgggttcagcagatgttcgtcgcttccctgaagaaaaaatacccggacattttggatttcaaccgtgaattcggtctggattactggagcaaccgcgtgaatgactgggctgatttcccggacgtgcgcggcacgatcaaccagagtctcgccgcggaattccagcgcttccagcgctccctcgtcacggagtttctctcctggcagtcggacatcatccgtgagtacaagcgcgacgaccagttcatcacgcagaattttgattttgactggaccagtcattcatacggctatcagccggaggtcgaccagtatgacgccgcccgctgcatgaccgtggcaggcgccgatatttaccacccctcacaggacgacctgaccggcgccgagatcaccgtgtgtggaaatatcgcgcgcagcctgaagaaagacaattatctgatcttagagacagaggcgcagggtctgaccccgtggctcccctatccggggcagctgcgcctgcaggcgtacagccaccttgcaaatggctccaacagcgtgatgtactggcactggcactcgatccacaatgcgatcgaaagctactggaaaggcgtgctttcccacgatttttccgaaaatgccacctaccgggaagccagcgaaatcggcgcggagtggaagcgcatcggcacacacctcatgaatctgaaaaaggaaaaccgcgtcgccatcctgctggacaatctctccctggcggggctgcgccagtttccgcttgagaccaccggtgaccacagctacaatgccgtgatgcgctggcttgccgacgccttgtaccgcagaaacatcgagtttgacatggtctcttccggcgagcgcgatttttccgcctatgattttctcgttgtcccggcgctctatgccgcatccgacgatcttctcggtgcgctcgaccgctatgtggcagaaggcggacacctgatcgcctctttccgcacgggcttcgccgacgaacagttgaaaatccgccacgatgtacagccgcatcttctttgcaggtgcctcggtattcactacgatcagttcacctacccgaagaatgtccgcatcaccaccgcagacggcagaagcgccctcgcacacgactggatggagcttgtcacctgcgacaccgcgacgtcgctcgcgcattatgaccatccgttctggggcagttatgccgccgtgaccgagaacgcctatcaaaagggctccgccctctacctcggcgctttcttcgatgatgaactgttggagccgctgctcgtatcctacctctccagacacgggtatgaaggtctttccgaagacacaccgcagtttccgctgatcgtaaagcgcggcacaaacgattttggcaaaaatctgtgctactacttcaactattcgggagaaccgcggacagtgatccacaccggaaatgcgggcaccgatcttttaaccgacaccccggttgccgccggtgccgtcctgacactggctccctgggggctggcggtcgtcgaatcatagatgcataaaaaccccggtgtatcccggggacacggcggagaaaagcagggacaggtaaaaacagaatggtaaaatgttccgggtggaacttgccggcggcggttctgatcgcaaaatccggcatttctaatccgcaccgcgcccggcatccccgatgctccatgtctttccaagctttgagcactccgcgggtgtgttcgcaagccgacagacaatttaaggacttttgtgtgttccttgcatcaccactgaacaaaacataaccgcgcgaagccgatgtctgaattggcatctgccatgttttcaatagcagatgccaacgagtttcggttcgcgcggttttatattgtctgtgaaggggtgatgctaggaacactaaaaagtccgatcattatctgcggcttgtcggacacatcccgcggattgtcaaagcgtggcaaagacacggaatcagatgcctggcgtgatgcggaagaaatgctcacattttgctccaaagaaccgctgcctgcaagttccacccggaacatgttgtcattttacaattaactcctgtccctgcttctctcctccgcacccccgggatgctccggggtttttatgcacaccggatattctacaccgcccgccccaggaaccgcgtcagttcctcgatcggtatcggtttggaatacttgtagccctgcagatacagtgcattcatctgcttgcactgatcctcgtctttttcgttctccacaccctcaaacagaatctcatagtgcgaattcttgaaaatatcggaaaagcttccaaccatatagcgggattctgcatttttccctgccaaaatagtcagcgaacggtcgaacttgatcacatcgatcggcagaccgataatgcgctcgaaattcgagtagcccgttccaaagtcatccagatagaatttgattcccagcttctgaagactggtaatcgtattcttaatgttgtcaaattccgtctcattccagctctccgtcagttcaatcgcaactttttcatacgggatttcattctggcggatgatgtccatgacatccttgcagaattcctttctgcggaattccagaatagaaaaattaacggaaacacggtcgatctgatacccctcctgctccaggcgtttgatctggcggcaggttttatttaagatgattttgctgagcgtatgaatataatcgtgccgctctgccatcggtatgaactgatccggatataccattcctgtttccggcagctccagccgcatcagcgcctccgccgaggcaaaccggttggtacgtgtatttagcaccggctggcagtacactttaacgcgctcatcctccaagtcgcagtgtgcattgatgtcctttaattcgcctaatatgtaagatgccttccgatattctatgatgtccttattctgacactcatataccgcgccaaccggtattttctcttccataaactcattcaacgccagatactcacctgcctcacgcagcctgtcatctgcatgtgcaatcagcacccggtagcccagtccatgttctttacacacacgctcaaacgttttttgtatgttatattttccgtttttctccgctttattactcagtctctgatacaccagtgcaagcttatcatcctgcagacggaacaggcagaatgttttgaaataattctccgcaaacgtcagaatcgtacgcggaagttctggtatctttttgagattggtttccgggaatcccatgaagattacagaaaaatcatcgtcccccacatctctcagatagctgtcaaacgcaccagcatcaagtgttcctgtctccctgtcgtaagatgtataatgaaacaaaaacagcactcccatatagggaagtaatagtgccatgcagctataagatgtagatacatattctgcctccagtgcaatcatgccaaacgaaaacagtaaaatataggcaaggcagcgcagcattttcagcacgaacttcttccggtacgtaaaaagcacaacgacaagaacgatacagtaataaatataggcaaaacgaaacggatcaaaatagaaattctgatgaaccatcagatctgcatcgatataaaaacccagatgcgtaaacggtgatccgatctcaagaaaagcaaacaccgcatagccgccccaggataccgcgcccaagagtcttgccggtctctcttccagcttaagaagtgtaccgaagtaattgcagagcagcacaaacgtgagaatcagtaaaagatatatcccatcctgtaacacataaataagaatcttccgggattctgtaatccgtgtgattgctgtatggaaactgatactgcagaccgtcgccatcatcaggcaaaccgttcccgctttgaagataatcaggctcttctctcttaccgtataggaagaatgcagcagcagccagcagatgatgcagagcacaatcgcgctgatatcggctacataagtataattctgatagaacaaaacatccgtcataaactcattctccccttcgatcattttccctttatattatcattatacatttattgacagcagatttcaattttttcacgcaaaatgacagcaaaggggcagagaagcggtaaagcttctctgcccctttttctgtcatctttggctgcacacgcctattcgtagcggagtgcatcgataacttccatctttgacgccttgttcgccggataataaccgaagaacactccggtcagcatcgagaagaacagtgacagtaaaattgcagttgccgatggatgcacctgcataataatgtaattggaatactcggaatacatattggcaatcacaaacttcgctgcctggccgagcagtgctccgacaccaacaccgatcagaataccgataatgccgccgattaagcagagcatgatcgcctcaatgacaaactgcatacggatcgtccgccgctttgcgccgagtgccatacgcacaccgatctccctcgtccgctccgtgatcgacacaagcatgatattcatgacaccgacaccgccgacgatcagcgagattgctgcgattccggatactgcaatcgtgatgacattgagcaccgtgttgatcatgcccatgctggactgcatgttgctcgctgtcacatggaaattcgtattgttctgatatacctcatcaaaataattctggatatcttccgttgcctggttgacatccgcaaggggcgtcaggagcagattaaagtattcataaccagtcttatctgccccctgcagcttgaagctggtctggatcggaatcatcatataagtggaacgatccttttctctgacagatgtatccacttttccaaacagtgccgcattgtatttgtaaacacctacaacaacaaaatcatagatcgatccgtcgtccattgttaccgataccgtctcgccaatcgggtctttgtctccaaaataattctttgccatcgtatccgcaacaacgcagactcttttcttccccagattgtctgccctggtaagattacgtcccgcctgcatctcaagcttcatatactcgaactgttctggtgtcatgccatccacactgacattggcataattgtcggaatccgcctcatccttgatctgcccgcctccaagataattctcggcagcgataccctgaatttcatccggatactgcgcaaccagttcatcgatcatctcctgtgacacataatcactctgtgtcatatccggataaatccaggtatcccagtctgcatcgtcctccggatagcgcgcctccacatagccggaaactgtgttgccgccgagggaattcattgtcgcggtcagggtgctctgtatggaaccgccgatcgtcgtgatgatgataacggaactgataccgataataataccgagcatcgtgagcagtgaacgcatcttgttcgacagaatactgatgattgcctcttttatgttttcaaaaaacatcagtgctcacctcccctgttgtcccccacgatctcaccgtctaagagggtaacaatacgctgtgtctccgtcgcaagctcctgggagtgtgtgatgagtacaatcgttttcccctgctcttcatgtaaccgatgaaacagatccatgaccatatgtccggtcttggaatccagcgctccggtcggctcatccgccagaatgattgcaggatcattgatcatcgcgcgggcgatcgccacacgctgtttctgtccgccggagagctcatttggtctgtgatctgcacgcccgtccattcccaccatcgccagcatctccatcgcacgctccttcgcattcttcgtcttttcctcaccatatataagcggcaccatgacatttttcaatgcattggctctcggcagcagattaaagttctgaaacacaaagccgattctgcggttgcggaccgcactccgcacctcgtccgtcatgccgttgacgtcctgtccttccagataatagctgccggaggtctgtctatccaatactccaatgatattcatcaatgtactttttccggaacccgactcaccgacgatggaaacgaactctccctggttcacggtaagatcgattccgtgcaggatttccagttcattgggcttacctacataatatgtctttacaattttttccattcggattactggttcactcactattcgctaacctccgtacctgtaccgtctgtcagtcccatatcctgttcagaatacatctgctccggtgtaaatgtctgtccctcggctatcgaaaatgtcgtgtcgtagatcagcatatctccctctgcgagatcaccgccggtcacttctgtataataatccacctcatcgccgaccgtgatattcctgcgcactgcggttgcgtttccgccatcgtccgcctcagccacaagaacatacgcctgcccgttgtcatcatactggatcagatcatacggaactgccagcacttctccctttgcctggatcatgacttttgccttcacagccattccgattaaaagttcctgattgtcgagcgcgatctcaatggaataaccaccggcagaagtcgtactgccgtcgcttcccgtcgtgccctgactcttcacacggaccactctggtcacggttcccttgatctgctcatcacccgtcgcatctgcggtcacagttgcctccatgccttcctgaagctttaatacatccgcctcctgcacggttgcaaccatctttaaggagctcgtatcctcaatcgtcatgatgacgttcttctctgcattgatgtctccgaccttggaattcaccgctgttaccacaccgccgcacggcgctgtgatctcacagtctgccagctgttctttcagattgctgagtgtgtccttggatgtcgtgtcggtgtctttgtacttgttcagctcctgtgcctcctgtgctgtctcaatcgcacggttggtggtctctactgccgtatcataagcagtctgcgcatcctccaccgcctgcttggcagcgagcagtgcagcgaaatccgcctgtccctgatcgtagagcatctgtgcgccgttgtagctgtcctttgcgcggtcgagtgtcttctgcgccgccgcaagcgtcgttgtctggtcatccttcgcctgctgcagggcgtccgccgcctgctgtgtattgatgctgctcaccgcattcgcattcgacatggacttctctaagtctgcgatcttctcctcgatcgacgtggagtccagtgtgcataagacgtcaccctctttcacgatatcgccgacctgcacattcatggaagtgatctcggacgccgcctttgacgtcacattcgtgctgctggctccggcaaccgttcccttaaccgaaatcgtatcggacagatccctcttctgtaccggctccacttccacggtattcaccgccatcgccacctgcttggtcgcgttatgtatggatataccgatccagaccaccagaactgccacaataaccagcacaacgatcagtaccttctttttcttctttggctttgctgctatcgcgcctgcattctgctcgtttttttgcttcttgtctttcattctcgtctctcccttacctgtattttacaaatttatggtgattgtatcattatcacccctcaaaaaaaatgggtttaagtaaaacttaagaattcttaggaaatcctaccatttttttaaagtttctttgtactattgtaataatacagtatatttatttgactgtcaagacattttctcagacaaaaatttctgctggaatacggacatcatctctctggtcagcgacagcccctccggatcttccggcacatccgaataatgcacccactccgctgtcgcaagctctcccgtgtccagcacaatgtcccgttctccgtccagctcacagaaatagccgagaagaaggttctggtcaaatccccacggctggctcttataatagtggatattcttcaccttaagaccgacttcctcctgcacttcccgcatgaccgtctcctccgccgtctccccgatctccgtaaatccagcgatgagcgcgtatcgtttgtactccctgttggcgtaggttgtcatcagaatatactctccgtccgtcaccccgacaatcaccgccggtgcgatctttgggaacacctggttgccgcatgcgggacagaataacatccgcagcgttccgttgtgcatgagtttctgtccgcatcttccgcagaaccggttatcccgataccactcatacagatgccatgccgtggcagccgcaaggatgtgctccttcggctttcccgaccgcaccgcaaacattttttcaaaacagtatccttccggtgtgagatgctccggcagttccgtcagaaaatacgtctcctccccaacggaaaacagatagatgctctgcggcgccatttctcccgccgtctcacagatctcccggagttcccggtaagtaaggaaggcaagcgtctctccctcccttacaaggatcttgttctccctgtagatcatcatatagctgatatcgtccggctgttttttttcgtactgattctgcagatgcagtggtaaaatatcctgtatcatttcgtctctcctttattacataattttccatgaaacaaaaaactgtcacaataagcatatcatgctttgcgttgataagtaatattataagaaacacacttgaggatttcatgtggaaatgcaactgggaattcgttggagaaaaatgtgagcatttcttccgacggaatgtttgcatctgattccgtgtctcttccacgtttggacaatccgacggggcatgtccgacacaccggagacaatgggcggactttctggcagcactaactgcactccctcgtagacatgataaaaccgcgcgaatagaaactcgttgccacctgctattgaaattaaggcaggtgacaactcagacatctgcttcgcgcggttatgttttactgcggaagtgcaggtaagtgctgcacgaaagtcctacaaattgtctccgggatgcggacatgacccgcggagtgctccaaacttggaaagacacggatcatcgaagatgcaaacatccggctggttagaaatgccatattttttgatccgaatttccacctgcatttccatctgaaatcccgcggtgtgatcttctgataatattacttatcacccaaaagaggtctatgcttattgcgacaattccatgcggcagacagactacattcccgtctgctctcccgccgctttgatctgtgccagtgatgcctcggctgccacgagcacatcgtaatttgtcacattcgcctttgtggaatccggcagcgcatcatactggctgcgtgctgacgagatgactgtctcactgtccgccgtcacttcgccgatagaattgatcagatcgatcacggtctgcacatcctgctgcagctgtgcggcgctctctgttcccggaagcgtgtacaccagtaccggccagcccttctcgatcgtattgtagatcgtctttgccacggatgtcggcagattgatgcatccgtgcgatccgtttgtcttataaatattcccgccgaagctttttctccagctcgcgtcatgcatgccgacgtctcccgcaaacggcatccagtattttaccggcgtcgcgtagtcctctccgcgcagcacggcatccgtggtcgtataggtctcgctgaacgctccggtcggagaaccgtgtccctttgacagatttcccgatacaaaatcgctgtccacaaccagacttccgttcttgtatacaaacagatgctgcgatgtcaggttgatctccacgtaggaattgccgtagtcattctcgccatggctgttcgctgtctgggaatagaccggctcacgctccacgctcttgccggacttgatgtcctcaagcaactgcgcctcctctccttctgtgtcaatcttccagccgtaagcgccgtttgagatcgttacttccggtccataagacgtctttaacgtcttcggtttgtacgcggtattgtaggtctttgcaagtcccttgacatagtcgagcaccgcctcctcgtcgacctccagttcaccatccagaaccgagagccactcgctgatcgtactgccatccacaacttctgtctgatccccgaaatcgtaggtaaccgtcgatgcgacgtactggtttaattcgtcgatcaccgcgagaagatctttgtcatcgtctcccaccgccgggtccacataacagccgctcttctccaggtcgagtgtgtcctccagcccttccacggcttctgccaccgcgtttttcaacgctgtctcatcgatcgtcgttccgtaatccgccgggacaagcgtatagccgtccgctgcggaatagccggaacaggacgcatccaccggctttctctgattctcctcctgcatgcaggaaagcgcttcgatcgtcccggaaaactttgtgtcgtcaaaggcaaccgttttttccagttccagtgcactctttccaaacagaatcaccggccatgcgaaggcgttctgatccgccagcagttcttctatctccccgtggaaaaccggcgccgcgccgatctgtgatgccgtgatggtctccgtctgatcctcgcgttccaccagagtcagctcatatcctccgatctcctcctctatgagctgctccacctttacggtgctgcatcctcccactttaatgccatctatcgtagtgccaaagcagaagtggctctggaaaaacaccgcgaatccgatatagcagactgcgagtattcccagaatgactgccgcggtaatcccgattttctttttcattttctgtttcctttcctcttatcgtaaacatttatatgcctgttctttcagtgaaaacacatggtttattataaatgaccctttttgtttgtcaacaacttcccccaatcgtaacaattatgtaaaatcttcgttttatttcttattgtataaatgcacaaacgatctttcgatgtatgaacgttttcttaaattttaaataatctttcttaaaaaaagagaaagccgattgtttcgcagaaatgcgtgtgctataatcgcaaacgtgaagaaattggatatactgctatttattatagaaaggatggatattatgaaaccagaacttcgtcagagaatcagtggctttattgatcgaaacaaggctctgtttcttttatcttattttgcaatctatcttccatggtttggtcatctcgagaagaccgtcaccacacattttcatgtcattcacaccgcgctggatgattacattccgttctgtgaatattttatcatcccctacctgttatggttcggctacgtcggctggggcatcggttatttctatttaaaagaccgttccgaatatttccggctgtgcgcaatgctgtttaccggaatgacaattttcctgattgtgtccaccatttatccgaacggacattacttaagaccgacaacctttgcgcgggataatatttttgtacatatcgtcaagtggctgtacgcttccgacaccgcgacgaacctgtttccaagcattcatgtatacaactcgattgcggtcaatattgcggtatggcgttctgatgcgttcaagcacaagcacgcaatgcgctgcggttccgccatcctcatggtgagcatcattctctcaaccatgtttttaaaacagcactccgtcttcgacgttgtgacaggtatgattacggcagccggcatgtacatgatcgtctatgtcaacaatccgttccgtcttccggttcgtcaggaaaaatatgagcagaagctgcatcggatctgaccctgagtaaagccggacggcgactgattgtaccattttcttttaaaaagataagtaatattattagaagatcacaccgcgggatttcagatggaaatgcaggtggaaattcggatcaaaaaatgtggcatttctaaccagccggatgtttgcatcttcgatgatccgtgtctttccaagtttggagcactccgcgggtcatgtccgcatcccggaagacaatttgtaggactttcgtgcagcacttaccagcaccaaacaacggatggcataaatcagccatccttatgttgcagtaaaacataaccgcgcgaagcagatgtctgagttgtcacctgccttaatttcaatagcaggtggcaacgagtttctgttcgcgcggttttatcatgtctacgagggagtgcagttagtgctgccagaaagtccgcccattgtctccggtgtgtcggacatgccccgtcggattgtccaaacgtggaagagacacggaatcagatgcaaacattccgtcggaagaaatgctcacatttttctccaacgaattcccagttgcatttccacatgaaatcctcaagtgtgtttcttataatattacttatcacttataaaagaaatgtgtactttccttccgattagatataatacatattctgctcggtctcgtactcacgcacaaattcattcaccagatccgccagcgtaatgctctctaagatccgcttcgtctcctcgttcacgcgatcccacaacagcgtgtccatcacctttgacaccgtctcgcagagtgcatcctcgttcaccgattccggctcgatactgtagctgccctccagcgcgaggatcatctgtgcaaccgtaatattttccggcttatccgcaaggacgtagccgccctgcgcgcctttgacgctcttgacaataccaccgcgctttaagctggaaaacacatgctccagatagtgcacagaaatctgattcctgtttgcaatatttaccagcgacacatgaccattggtggaattcaccgccagatcaatcagcgcacggatcccatagcgtcctttcgtggaaatcttcatatcagttcctccctttatactctatctccagatcttttcatagtaatcttatatgaatactatattatcatctgtcttctcggaagtcaaccgctttataaaaagaatacgcgctaagtaatattataggaagcattacatgcagatttctggtggaatgcctacgaaacattctgttcaaaaaatgcggcatttctaaccagccggtgactgcatctgtgatgatccgtgtctttccaagtttggagcactcctcggagggtgttcaaacgtggaagagacacggaatcagatgcagcccatccggctggaagaaatacacacatttttttcaacgaatgttccacatgcagttccacccgaaatcgcaggacatacttcctataatattacttattgcaaaaggtccgatacttatacgttattctacgcttcgaccgtgcgctctcccgacttgatctcgtccaggatttccgctacggcttcgcgctcgtcaaaatgatattttacacccttgatctcctgataatcctcatgccccttgccgagcagcacgatcatatctcccggctttgcatgtgtcatgcagtaggcgattgcctccttgcggtcgtcgatctcgatatattttccgttgctttttgccagaccgaccttgatgtcggcattgatgtcgcggatttcttcatcgcgcggattatcgcaggtcagaacgcacagatctgcaagttctccggtcacctcgcccatatcgtagcgtcttaacttggagcggttgccaccgcctccatagacacagatcaggcgcttcggatggtactctaagagtgtcgtcagaacgcttctcgtgctcacctcattgtgcgcataatcgataatcagcgaataatccttcgagaccggaaggatctccacacgccctttgacctgaaccttctcaagtccgtcgagcactgcccggtccggaataccggcaaggttgcacaccagcatcgtcaccatcgcattgtacacagaaaacctgcccggaatatgcacttttaccttgcagtccatgcagccgctcacggtaaaatgcatgccgagtctgccgccctcgttgatataaccgatgtccgacgcaaacagatccaccacctggtctttcacatcatttccctctgcggaaaatgtgcgcacctgacaggtgtgtccctttaaaatctcctcccagtgaggatcatccgcattgacgatgccgacacggcactgccggaacagaagactcttgcagtacagatactcctcgaacgactcatgctccgccggtccgatgtgatccggggaaaggttggtaaatacgccgtaatcaaacaagatgcccgccgtgcggtccagcttcaatccctgtgaggacacctccataaccacatactcgcatccggcttccaccatagccgcaaacatccggtgaagttcataggactccggcgtcgtatttttcgatgggatgtgctcatcaccgatcatcgcgccgatcgttccgatcagtccgaccttcttccccgccatctcaagcacgctcttgatcatgtaagttgtcgtcgtctttccttttgtacctgtaatgccgatcgtgaccagcttacggtccggatgtccgaacaacaccgccgacatgtaggcaagcgcacgtctggctgattccacttgaatgaccgtgatttgatccggaatctgctgcgcctcatcggcacgctcgacaacgatcgccgacgcaccctttttcaccgcatccgggatgtatttatgtccgtccgtcacagctcccaccatgcagacaaacaccgttccttctgtaatcttccgggaatcatagatgacatcccgcacatcgacatccatgcttcccgagagacactcgtatttgaattcactgcaaagttcccttaacttcattttatctccattcctgcgccacaatcgcgcatcttatgcactgctgcttatctgcgcctcttatccgatgatgtgtgacgcgtcgatttccgactcgaataccgtgtgggaaggtcccgtcatgaacagatgattcgtcttctcatcccactcgatgaaaagcggtccgccgatctgctcgaccgtcactttccggtctgtccgtccggtgaggacgcctgccacaaccgccgtcgcacagcctgtcccgcatccgatcgtctcgccggttcctctctcccactcgcggatcttgatgtaatccttccgcacaaattccacgaatgtcacattcgtcttattcgggaaaatggatgtcatatgttcaatcgtctttccatagccttccacatccagatctgccacagaatccacatacatggcgcagtgcggattcccccaggataccgccgtgatgtggaatgtccggtcaagcacctgcaccggctgctccacgaactcgggcagctccgtgactaccggaatcactgcggtggacagtctcggctcaccgatgtccgcgcggatattcgataccagcccgtcggtcacggtgagggtcagatgctgcattccgccaagtgtctcgatcacaagatctgtcttgtccgtcaacctgtgatcgtatacatattttccgacgctgcgcagagcgttgccgcacatttccccctccgtaccatccgggttgaacatccgcatacggaagtcccctttctcggacggacagatcagtaccattccgtccgaaccgattgcaaaatgacggtcactgacaaaccgcgccaactccggcagattctttaattcctgatgaatcgcatcaatatacacatagtcattgccaaatgcctgcatctttgtaaatcgcatcttctcaccaatctcctttatcagccgttcattgcgcgatccagatcggcaatgatatcctctacgttctcaattcccactgacatgcgaaggaagcagtcggtgataccgagcttctccttgatgtctgccggcgtgtcctcatgtgtctgtgtcgtcggatatgtgatgagagtctccgttccgccgagactctccgcgaacataatcatgtctacgccctttaagatcttcttcactgtctcaaagctatccacggtgaaggaaatcataccgccgaatcccgtggtctgctttctcgtcacttcataatccttgtgatccgcaaagccgacatagtagacttttttcaccttcggctgtgtgcggagccactcggcaaccttcatcgcattttcattgtgacgatccatgcggactgccagcgtcttgattccgcgcagcaccagccagctgtccagcggcgcgagctgacttccgtgggacttcatatgaatatggatctgatcggcgatctcctcgttgtcttttattaccacaatgccagagatggtgtcgttgtgtcctcccagatattttgtggagctgtgtgtgacaatatccgcgccaagcgtgagcggcttctggaaatacggggtcagaaacgtgttatccaccaccgtgagtgcattcacgctctttgcgatctcagagactgcgtggatgtccgccaccttcatcatcgggttcgtcggtgtctcaatgaaaaacatcttcgtattcggtcggatcgccgccttcacctcatccagatccgacatgtctacataggtatgctcaataccgtattttccaaaaacgtccccaataatgcggaaggttccgccgtaaatatcatccgataaaatgacgtgctcgcccggattcaacagggaaaagacagccatgtttgccgcctgtccgctggaaaatgcgaatcccttgattccgccctcaagaattgccatcgtgcgctctaattcctgtctggtcggattctcgagacggctgtatgcaaagccggtcgactcgccaagctccggatggcggaatgtcgccgcctggaagatcggcatgctgactgctccggtgagcggttccgttcccagcgcgccgtgcacggccttggactcgaaatgcagattttcctttgtatcaaaatcggtataattactgaaatttttcatattattttcctccatctgtttggacatgcgtttcctcatatacaactattatacaaaacactttttataatatatagtctcaaagtgctttttatattgcaaaaagtgcttttttataatacagtaatagaaaaaggaggacgcacgcgatgccggaatacaaaaaggtcggatacttaaccaccagctttaagatgtttcatttaaaagatacttcccgccgggagtttcactaccactatcacgattttcacaagatcctgattcttctcggcggtgacgtgacctactgtattgaggggcgcacctaccagcttgccccgggcgatattgtcctggtcaatgccggggaagtgcacaaacccgagatccactcggatcttccctacgagcgcatcattttatatgtctccccggattttcttacggagtacgccggggaagactgcgatctctccttctgctttaagcaggcgtaccgcgagcaggcacacatcctccgtctgcaggattccaagggcggcaggcttggcgcctccatccgcgcgctggacgcctccctaaacgacgacgactatgctgcggcgctgcgtcaccggcttttatttctggaatttatgattcagctcaaccgcgccgccctgcaccaccacattgaatttgtgggagactccgcttccaacgagaagattctctcgattctcacctatctaaacgctcatctgaccgaggatctctcgattgatgacctggcctcccgcttttacttaagccgctcctacctgatgcacacgttcaaggagcagaccggctacaccatcggcggctatctgctcaccaagcggctgtttctcgccaaagagctgatcgccgccggtacgccgatcacggaagtatgctattcctgcggctttcagaattactcgaccttctcgagagcatacaaaaaaagctttggggaatccccgagggattaccgccaaagcctttaagccatgcccgcagagcgggctatgttcacagagcgggctatgctcacagagcgggctatactcgctctgacatctcattcatgagtgtaggtatcatctgtttcttacgtgagataatgccgtccaacaggatgccatccgcatcctcctgcttcttgaacgcatgcgccagaatttttccggcatcctcccccgcaaatataatcttggaagattcctccaaaatatccgtcagcatgacatataccatatttaaacgcttctcgccgagcacctgcggcaggaacgggcggagctgttctccgatctgttctaattcctctccgctcatggcgctgatctgggcaacaccgaaatcacagtcttccgtgtggaaaatcttaaaatcctgatagaaaatctcttcggtcgtcttgttcttgaaatcacttccggcgcggaacattttcttcgcatgatcctcaatatccacatccgcaatctctgcgagccgctttgcaacgctcttgtcaagcggcgtgcaggtcggtgagcggaacatcagcgtgtcggaaatgatcgccgagagcaaaagtcccgcgatctctttcggaatctccaccctctgttcctgatacatctgatagataattgtcgaggtacagccgagcggctgattccggaaataaaccggcgatacggtctctaagcttcccagtctgtgatggtcgatgatctctaagatctccgcctctccgattccgtccaccgcctgtgacttctcgttgtggtcgacaagaatgatctgttttttctgcatattcatgaggttacgtctggaaatcattccgacgtagttgccgtttgagccgagcaccgggaaatctctgtggcgcacccgcgacatgacatccttgacgtcgtccacataatcgtcaatgtcaaacgtgacgagctcccgtctggtcatgtactgcttgatcggcatactctgattgatcagacgcgccacggaaaatgtgtcgaacggcgttgtgataatcacgcagtcccgcttctccgcaagctttttgacttcttccgccacctcgagacctccgccgatgatgatgcagctcgcgttcgaccggatcgcctgcatctgcgcctcctcgcggtcgcctaggatcaccagatcgtcatcctcgatataatccgccatgtattccgggttggaggttgcaatcacaacttttccgcgcacaaaatgtgcatgctcattcccggcgtagacctcaccgtcgatcgtctccgcaatcgtcttgtactgtgtgcgcgcttttgagagcacgcagttgtccagcacgtccatgtaggacgtcgcaatatccttggtgacgatcacaccttccagcttaccgaactgattggtgaccggaagcgttacaacctccagctttttcatcagctcccatgcccgtttcagcgaaatctgattgctgacaccggccgtcttgcggatattgatatccttgatctgtgcaccggcataggtcacaagcggcggttcctccacgccaaagcgctctaacacgtagcgggtctcctcattcaccgcgcccgcacgctttgccacataagtcttcttgtccccgctctggtttttcagatatgcataagaaatcgcggcgcatatcgaatccgtatccggattcttatgccccacgacccacactttctttgattctgtactcatatgatcttctattccttaaagctaaaaattaaacacaccgagagaatacaggatgaatccgatcagaacaacaaagttcagaattgcaaaccaggaaagacatttgacatatcccttcaccgatccgactccctgctccatctcgtccatcttctcgatcttggaatcaaattcgttgaacagatcctgaatgttgcggtagcacttcacgttctccgaatgtaccttctcggagagatctgtcttgatggattccagctgtgctgtcgcattctcaagcagcgccttgacctcggcgatctgtccctcggaaagcttcttgttcgcgattgcctgctcctccaaaaactgcttgtttgtcgcaagctgctcctcggaaagctttttatttgcagcaatctgatcctcattcagcttgcggttcgatgcaagctgctcctcgctcgcacgctttacctccgcaacctgccccgagatgcttgtctcaatctcggtcatcttcgctgtcacacggtctgccagatcatcgaccttcttcgtgaactctgtcacgatcttgtcagcttcctcctggcgctccaccagaatgtgctgccactcctcggccttgccttcccgctcgttgacaatcgactgcagttcctgtactttattctccttcgctgcaagcagatcctgcagctgtttcgccttctcacgaaactcgtcgatctgacttaataagaaatcttccttttccacttctgtctgtatcctttcccgttcctgcgtgctctccccggtctctaaaaccctggtctcccgaaccttattattgctctcgcgcttcgggtgtgtcttatatccctccgcccgttccggctctcctgcaggtcttccttgtctggggtgaatctgcgccagtaaaagctgaaacaggtttgccataaacgcttcctccctttgtgtcttccgaacaaaaaacacctatgggtattctatcattatcatttttctttgtaaagcaggaaaaagcaaccgcctcccgctcactctttccggcggaaaagcagtggtgtctccgccgccagcattgccagccatccgatcaggtaggcaaccggcagtgccacaattccaagcttcatggaaaataccagcggaacggctgccgccacccgcactcccatgttgataaaactgctgctgagcgtcaccttgaggtcgcccattccgcgaaaatatccctgaatcccgtttgtggccgccggcagaaaatacatcaccgcaatcgcatgcagatagatcactcccagggagatcacctcctcatccgtcacaaacagcttcatcagcggacgcgcaaacacaaagcagaccacacagataaagagcgcatagatcatctcgatccacagcccgcaacggaatccctcccggatccgctcctttttgccggcacctttgttctgtgccagcagcgcggtcatcgcatgggcgatattctgctccggagtgtaggcaaaatcatcaatgcggtttacgactgcaaacgccgccatgacagagattcccattgtattgacaatcgcctggattccgatcttgccgagctgtaccgtcgcctgctgcatggcgctcacccagccaaactgcaccgtcttataaaataacctccggtcaaacacgcgccacttgcgccccaggcagagaatctttacctttttcttaatatatagcccgcacagcagacagcagagtgcctcgcttagcaccgtcgaaaaggcacatccgttgctgccccagcctagcaccaccacgaaaaacaggtctcccgccacattgagtgcagcgctgatcatcagaaaataaagcggcgatctgctgtcgccgagtgcccgcaatgtgctcgcataaaagttgtaaataaacgtaaaaatcagtccgcagaaaataatgcggaggtaccccgtagcaatcggaagcacttcctcctgcgtccttatcagccgcagcagccacggcgtcagaaaaatgcagacggcggagagcaggacggaaaacacaagcccgccgatcatggtcgaactgatctgccgctccaggacatcataatcctttgcgccgtagtgcattcccatcagaacgcctgctcccatgcacatgccactgataaacagaatcgcaagcgtcatcagcggactgctcgtaccgaccgcggcaagcgccgtctcccccacaaattttccgacaatcatactgtcgaccgcattgtagaaaagctgaaacagatttccgagaacaagtggaattgtaaaacctaccagaagaggcggtatcgctccttccgtcatatcctttgtcattgcagatgcctttctatcttttgttattctgcttcagaatgtgtatgatccttccctcataatacaccgcaatcgctgcaatcaataccacgataatcaggctgtatccctgttttaattctttcccgagcgcatcacagacgctggtgaataaaagtccctccacaaagacaagcttgaccatccgaaccatccgaagcgtatactgtctgatcttaccgctgcatacctcccttgtcaatccgttcacacgttccgggtagacggcaaggagggtcagacccacatataccagaatcataaacacaagattcatcatcaggttcaccggattgacgtggaacgcgatcccgtaatagatctgtaacccgagataggcgatcgccgatacgataccgactgcctcaatgagcatcacctgccatgtcatctcattctttttcatatgtctcacacctccttttccctctctttttcttacagcaaaagttcctgcgcccagcactgtgtcagccgctctaaattccatgcggcattggcaggactcgtagacggcagcttctttacttccggcatctccgcggtcagacaatatttagaaaacaggcggtacgccgtatccccgttggcacagatgcgccggatgtccgccgtctttaagatcacttccatgtcattcgccgtcacattgcggatcgaactgtccgatgatcctgcaatgtcacaggaggcaatgacatcccacagcgcaatatggtgctctaacaaaaacgcctttttctgcggaatcgtctccggcagcgtatcctcaaagaccgctgccagcactttccagaaacggttctgcggatgaccgtaataaaactgctgttctctcgactttacagacggaaaggatcccagaatcagaatccgggatgcatcgtcataaacaggtccaaacgtatgtgtcacatgcgtatattccattctcttacaccaaaacggcatcagtgcagaccgcactgatgccctcttccctctctattactgataatctgccacattggaactgtccaccttctcgaacggtacccagacgtaaagtccgtcgtccgacaggccttccattccctgcgtcgttcctccggaaccgagtgcgattgccgccttgacagccgcctcaccctgtccgcttcccgactggtatacggtaaatgccatatcccccgcctggattgccgcacagccatctgctgtcgcgtcaattccaagaaccggtactcccgatatgccattcttcttgcaggaatcgatgactccaagcgccatggtatcattgttgcataccaccgcatcaaactgcttgcctgtctgcaggaacagatcgaaataatcttctgcaattccctgctcccagtctgcgttatcctcaaacacgacgttgatcttcttgccggatgccttaagcgtatttttgaactcctcggatcttcccttggttgcggaatgattcttcggtccctttaagagtgccacattgatctcatccttgtcactcatctgatccagaatatattctgcctggtattgtccggcaactccctcatccgatcctacataaatgtatttgtccggttccagcaccgatgcatccggacagctgttgtaaaatacaatcggaatatctcccgccagcgcttccagttccagcgcagtgtccgcatcgaccggtccacacatgatcgcatcataatcttccgcaaccgcctgtttaatctgcgctacctggttctcaatggagttctccgcatcgtacaccacgatctctgctccactcgcctccgctgtcttctttgccgcatcgatcaatgtattacggaacgcatctgcctgtgacagtgatacatagatcttcactcccttgccattcaccgcggtatctcctcctgtgctgcccgcctgacagcctccgaggcacgtcactcccagcgcagccacgagtgctgcactcatcaatctcttcatatctgataccccccttaaatgcgaaacagcttaacctgatctgccagctgtatggatgactctgtcaagcttctggattcttttgccacgttctcactgttctctgcaattccctttgcctgcgtcagcatggactctgatgttgcaagaatctcatctgagcttgccgcctgctcctcggaaattgcagcaacgttggttgccacttcatctacctggttgatcttgtccaccatctggtcgatcaacgcgcttgtctgctgaatattatcataaatcttgtcaaaggtatcgattgccgtatgaatcaatccactgctctcattgatattgtcggcgctgtcgcctgcctgacgcactgcatccgccacaagttcattgacctcatggatgagctttgaaatatgctctaccgatgcggtactgttgcttgcaagcgttccgatctcagaagcgacgactgcgaatcctcttcctgcctcgcccgctctcgctgcctcaatggaagcgtttaaggacagaaggttggtctcctccgcaatatttccgatcagctgtacaatctcaacaatctcaccggatgccgtacccactttatttaccgccgcttccagattctggatagaggtgcggatattctcaagcgcctcgccgacatgctccatatcctcgcgtcccttctgggatacctcaacggtctcgcgcatcttgttgccgacattcacgctgtcgtccttcgtgtctgcaaccacaccggcaagcttggtcgcgttgtctgcaatctcattgacggaaacggacagctgatccaccgtcatattcagctcgctcatggactgggactggacatttgccgccgactgcatctctctggacacactgtcgctcgcatccgcctgcgttcccagttttccggaaatgtctcccatggacgcaatcatctgcttcatggatgcgataaagcgctccacgctgcggctcataagcgcaatctcatcattgccgctgctcttgaccgatacggtaaagtcgccgtccgtcagcgccttgatgacgttcgtcagcttccggacaggtgcgatcacaacgtgcgttgtgcgctcaatcactacacacagaatcagaatggagatcacactgatcagaatcatcagattcctgaggttcgcaaggtctgccagtacagtgctggtcggaatataggaaaccagaatccagttagttccggatacctcctcaaacacggtcatattgccgtccaatgtggaaaagctgtaatcacgatccgcaatcttcgccgctacactctgctcgaatgcactgctgccgtcgctgccgagcgtcgtggaaatcttcgcggaatcacggcttgccagaatcgttgccgtatccttgtccacgaggatagcctccgcattcttcatctcgataaacgcgtttacaatgacggaaatgcggtcgagcgtcatatccgcagagatgactttcatcttgccgctgccgtcatttaaaataccggatgcactgatgacactgacgccttctgaattaacataggaagatccgatcgccatattgactctggtcagtccctcctgataccagacactgttgaccgggtccgactcactcatcgccgaatccgacgctttccagagctttccggtctcatccgcgatgtaaagtccctccggataatttgagttataattatagtaggaatccagcatggtctgtaattccttgtcgtccggcttcgtgttctctatcgttgtcttcactatctggaacgccccgatattctgttccagccagctctcaatctgcgacgcctgattctccaccgatgactccagcagattctcggaatagctctcaatcagccctgccgacgtgcggtaggcgatcagtacgagcaccagaatgctgacaatgacaaccggaacgatcacacctaaaagcttaaccttaatcgatacgattcctttttccttttgcatgtgcctcaactccttttctcttgtgataccccagattctatgataattgcataataatcttgtcaatattttctcatttttgcatattactgtcaacatctatcgacggattcccgccctgaagtcgcatgtttataccatttccgagcgccctttcgtctcaaattgtatacacgtattatttttcaaatacctgtatcttttcttgaaaatgaactgccctgtgctataattatttaggttaatgtctacgcttttgcgtacacaagagaggagaaccccagatggacaatttaatcattccaaaagattatcattcagaattgaatttgcatgatacacagattgcgatcaagacggtcaaggactttttccagggactgcttgcactgcgcctgaatctgtcccgtgtatccgcccctctgtttgtagacccgctgtccggtctcaacgacaacttaaacggtgtggagcgcccggtcaccttcgacatcaaggagcagaacggcagaaccgccgaggtcgttcagtcgctcgccaaatggaagcgctacgcgctcaaaaaatacggcttttcttacggggagggtctttacactgacatgaacgccatccggcgcgatgagatcaccgacaatatccactccatcttcgtggatcagtgggattgggagaaagtcatcaagcaggaggagcgcacgctcgacaccttaaaggaaacggtgaacaccgtatacaaatgcctgcgcaagaccgaaaaatacatggcgatccagtacgattacatcgaggagatcctgccgcacgacatctttttcgtcacgacggaagagcttgcggagatgttcccggacaacacgccgaaggaacgcgaatactatatcaccaagaccaaaggcgccgtgtgcatcttaaagatcggcgatacgctggaaaacggcgagccgcacgacggacgcgcgccggattacgacgactgggcgttaaacgcagacattcttgtatactatccggtacttgacattgcccttgagctttcttccatgggaatccgcgtggacaaaaaagccctgctgtcccagcttaaaaaggcaggctgtgaagaccgcgcgaagcttccgttccagaaggcgatcatcgacggcgagcttccttacaccatcggcggcggtatcggtcagtcccgtatctgtatgtttttcctgcgcaaggcgcacatcggcgaggtgcagtcctccctgtggccggatgagatgatgcaggcatgcgaaaagagcggaatccagctgctgtaagcctcgattaaaaaaggaattgccgcgataagcatagatctcttgggagtgataagtaatattatcagaaacactcttcgggatttcatgtggaaatgcagatagaatattcgttggaaaaaaatgcgagcatttcttccggctgaatgtttgcatcggattccgtgtctcttccacgtttggacaatccggcgggtgcatgtccgacacaccggagacaatgggcggactttctggtgtccctaatggcgcctcttcacagacaatataaaaccgcgcgaaccgaactcgtcggcatctgctattaaaaataaggcagatgccgactcaaacagcggcttcgcgcggttatgttttgttcagaggtgccataagggacacacacaaaagtcctataaattgtcttccgggatgcggacatgacccgcggagtgctccaaacttggaaagacacggatcatcgaagatgcaaacattcggctggttagaaatgccacattttttgaaccgaatttccatctgcattttcatctgaaatcccacggtgtggttttctgataatattacttaccaatccaaagaacgatattcttattgcggcaattcctttttgtctcctttattattccagcagccccagaaagatttctctccgctccacttcttccgcttcctcatttccgtccgccctggcgtgcagcagcggatattttgaccctgtgcgcagcatctccatcaccgacgcatagttggcatattccggcgacaccagaatcattccttttccacgcgacagttcctgctccatcaggctgcatagatagcggaggtttgctccgtgaaccagcggaaacttttcccggatctcctgtaagcgttcgtccggctgcttccagctgccgtagacgccgcggtaaatctgcataaattcatgcagctgttctgtaaaatgctccggaatctttcgccccgactccgcagcaaggaaccacagatattccgagagcggcatatacaccggaacaaaagcatgtttcctcaccgcttcctccatattctgattcagataagcgctatgcagcacaatcggatcgccggccagcagcagctgtctgtcctccgtcacatataccgcccactcctgtaaaaggcttttggtccactccctgctccaggcatccggcgcggcggtcttctcccggaaagaggcacgcaccttttcccgccactcctcatccaggcagtgccatgcatccccgagtaagagcacctgccacaagatatccgcttcttccgcaaaaagcagctgttccagaaacggtgtcacaagatgcgccctctttccgtccgcatctaagaccgcacgcaggatttccggaaccattccgtccgcctccgcaccctcggtctggaataccagaaactgtttttcctccccgtccgtctcctgcagccggtttgcaatctgtcctgccgcagccgagaatgtacagtattcttttgcggtgctgtacgcttttcccgcatgaagatcctgcgccgtgtaatccggcagcactgccgtgcgttttcctttctggttcaggtaaagtgccatccactctgtatacacggacagcggcggcagatacaccgtctcctgctgcggttctttcatatctttcgtatctttcgtgtctttcttcccgtcccgaagccgcccggacaatacggctgcctccggcagtatggcgcgctccgtgcagttctctacatgggataagctgtttaaaaacgcctcgattctcgttatcactcccaccttggactgatgctcgtccacctctattttcaggtacggcttgtcccccataatttccgcaaaaaggtgggagatcatgccgtccggtccgcagccgtggttcgtcagatagacggcatacagattcggatgctccttaatgatcttcgctcccgacagaatgtgctgcgcaaatggccagtacaaatttggataatgaccggacaaatccacatcatgtcctttcagatgggaaagtgtcaacactctgcaccctctctttaacatttctccaggaattcccatatttaaaaccgggtctgacacgccgtagtttcttgtaatcagaacgagcaccttgtcctccggtttcaactcgtccaggatctgcgcgcccagtttttcagaattcttctcacagcgcaccatcgccgccgcgcccttcgcgagcgccgccgcacaccgtgccttgtcgcatcccagttcctgacccgctttgatcatcgctcccgcgagctgcggttttcccatatccagatccagaaccgggcagatcagctccacgccgcgttccgaaagccccagcacacttgcgacaatccgcggcgctgtctgcatatagacacagccgtaattgtgcgcaacgccggaagtctcatgccggatcgtatggatacacgggataaaaatgtagtccaccttttttctcgcaagccattccatgtgcccgtgcagtaattttaccggataacaggtctcctccgccgccatctcctgtccgagcgcaatgatcttatcgtccgtctccggcgacagcaatacattaaagccgagagtattaaaatactggtacgtcatcgggaaaaatttataaatcatgagcgcacgcggaattcccacagtctttttccccggcagcagcgttccgtcatagcctgccaggaaccatttctggctcttccggtaattctcctcattccggatgctctccttttgggatgtgccaccctgctcttttgccgcgagcgccgctccgtatgccccggtcacatcgtaaaacggcgtgatgtgaagccgttctccaaacacttcatagaaagccgcaacgattccctcgttatgcacgactccgccctgaaggcagatatgttctcccttgcgcttattgccgactaccctgtttaaatagtttctgacaatcgagcggcacagccctgcacagatatcctccttgtccgtgcctgccgcaagctccgctgcaatcttggattccatcaacacggtgcagcgctctcccagatcgatcggcacatttgctttcaaggcactgtttccgatctcctccagcgatacttccatgcggttcgcctgttcctcgacgaaggagcccgtacccgccgcacacactttgttcatctcgaaatcgacgacctgaccgtcccggatactgatgtatttggagtcctgaccgccgatctcaaacacggtatccacctccgggcacagatgggcagccgcgcgcgcctgcgccgtgatctcatccaacaccgtgcctgcaccggtcttctccgcgatatagtaccgccccgatcccgtgacaccaatgccttcccacgtgagtgcttccccgtatttccgctttaactgtgccattccctgctgcaccgcgccgagaggattgccgcgcgttctaagatacagatcgtcaatgacggctccgtcctcccccgtcagcacaaggtttgtgctcgtggatcccacgtcaatcccgagccagagcttttccccgccacgtaacggtctggtccggtgaagtgcctccttctcgtagtcatatcgcggcagcgcctttcttttttgctcctcatccgcccccttcctgcggatcgggtgtttccagtcgaaggccagcttcccgcggcatgcacaggctgcgattccggcagcagacaccacagctccctcttccccgcaaagcagtttttcctcttttaatccgaagatatcacagatggcgaggcgcacgccttcattatagacaacgcctcccgtcacaaacaccggcggctgtaccggaagtttccgcacgaccgcagatttaaaattgcggatcacggcataggaaagtccgagcagaatatcttccaccggcacaccttcctgctgtctgtggatcaggtctgtcttggcgaacacgctgcaccgtcccgcaagccgcggcacacttttcgcccgtctgacatactccgagtaggcggacagcggaagtccgagccggtacatctgatcctcgaaaaatgctcccgttccggcggcacattccccgttcatggcgtaggagagcgtctctccctcacggattccggtaaggaagcaggaattctgtgctcccatctctacgatgcttcccgcgtccggatagagcattctctgtccttccagaaggctgctgatgcggttgatctgcacttccttttggatccccggatacaaacagactgcaccgggattgaccgctgcatacaaaatcctgtcgccgcacgatgtctccacctgcccaagcatgtccacaagattctgatacagttctccgcgatgcagtctgtaatctttatatatgatgttttcgccttcgacaacagcgatggaaatacttccatttccgatgtcgattccaagtcctgcttctctcattgctttcctccgaaattgcctcttacgcatagttagaatattctaactaaatgtatcacattgcaagagccgtttcggttgcaaaagcaacggaatcagttttctattagagaaagattctcaaatagttcgatcagtctaacttcaatcctgccagaagcgagccaaggctggttcctgtggatgtgtggtctgtgtatgcctccagatcttccacaccttcggtatctaccatctcctctgccagcgccttcatggacaggctgatcttattgtcgttggtatttaatacctttgccttgaccttctctccgaccttaagcacttcggacggctttccgattctgcgctcacagatctgtgagatgtgcaccagtccgctcagtccgttgcccagatcaataaatgcgccgtacggcatcaggctctcgacagttccctcaagcacggttcccggcacgatcatagagatcttgtgattgcgctcctccgcctctgcctcgagtgcgaccgcctttccggaaagcacgagcttttcgcgctcctcatccaccgtgatgacccggaccggaatctcttttcctacccagctctccgtatcctccacataagcggatgtgatctgggatgccggaatgaacgcgcggatcccctcaagatatgccacaacgcctgccttcacgctctccttgatgcggacggttaccgttgtaccctcctccatcatctctttgagcttctcccatgcctgctcttcattggcttccctgcgggagagaagaatgttgcctgcgccgtcgtctacccggatcacggtcgcctcgatcgtatcccccacatgcacagcctccgccagtgaaaaatccggatcgctgctcatctcctccgcactgataaatcccggtgcataatatttcaggtcaagcgtaacgccctcctcgttgacatcgatcaccgtgccggttaaaatatctccctctctgattctgcggaaagaagcttctaactcctccttgtaatcatccattgattccatgtgtcttaaacctccatctctttttctacctgtagtgtaccacatttcagtctgattacaaccttgaataaatcaccatccacctcgattgacagttttccgccctgcgcctcggtaaaacttctggcaatcgcaagtcccagacccgagccttccgtgccgcgcgaagtatcgccgcgcacgaagcgctccgtgatctcctccggatcaaaattcagttccgtcgccgacatatttttgatcgtgatctccacgaactcctccggtgcctccccggatgtgtgcacctgcacgtacacgcggctctgcggcatcgcatatttctgaatattgacaaacagattttcaaagatgcggaatgtcttctgattgtcgagcaccacgatcactttttcctccggcacatcccagcgcagcgtaagtcccatcgccgcaaagcgctccgtatgctccaccgcaacctgctttaacagattcaccacatcgacttccatcggatgcagcacaatattgttgctggtcgccttgctgacctcaaaaagatcctcgatcaatatttttaaccgctggctctttttatcgagcgtctcaatgtatgacctgcgctcctcctccgtgatgtcctccttctttaacagttccacgtaggttgtgatcgccgtgagcggtgtttttaaatcatgggaaacgttcgtgatgagatccgttttcattcgctggcttttcacttcctcatccaccgccttcttaaatccgtcacgcaccctggaaagttccaccttcatcggctcatatattcccagatcctcggtgatctccgtgtccagatctccgtccgccatccggcttacactgcgcagcagcgcctgatagtctctgccgatcctgtcataatattttttgataaaacagaacacaaagatggagtacacgatcagcgcgccgatgccgaaaaaccacatcatcgagcagagcgacagcaccgcaaagttgatcagcacgattttccagatcgtctttgtggatttttctgaaaaatccacatgcgccacctcatagcggaacgtgttccacaattttttcaaccacggaaaaatctgataaatcaggctgtactgtctgatatattccctgactcccaggaaaaataccggacgcagtacgcgaagcgccgcgtaccagatgccatacaaaaacaggagcggaaccatcatctgtccaagctgtaagatggctctccaggcattgtttccaagtaaaacatccactccttcgctgtaataggaatagcttcttatgatatcgtagaagttttcctccatacatgccatgcagcagacggcaatcaccgccacctccatgagataccatttccctgggcgttgcattggtatgtcttcgttccagatgcgcctgctcgtcataagaaacatccatcccgccaccgcagcaaggcttaccagaaacaaaatgcttccgccggacgcgcggtacaccagcaccacctgcacccagtaatttgtcataccctcatacggatctcccaaggaaatcgtatcgctctttgacaccggaagcccgaagatcaccttaaagtccttcggtccctgcaactgacccgcttccacatatccgcccagcgactgtcccaaaagattttcccggtctacattctgaaacgccttgatcagaacgctgccgctgatattttcgtcgtacagcggtgtcacttccagcgcgccctctttgtcaaaggataagcatacgatgtccgtataatactgctttatcttctccgtcacagttccatccacgcatgtctcgagcggctgatccgtatttttcacgcagtcggcactgcttttgtatacacagtaatcgatgttccagctgtcactctcaaactggcttttccattcgtcaaacgtagaggttaccgtgtcctttacatactggtaatcttcatcatccgtcggcagattcaaaaacagtccgcctgcatctgcctgcccgctccgctccatctgctctacatacaggacatagctgccctgatagagtgtctgtaccgtatcgttgtccacgctgtccgaggactcgcgcatcatctccgctttctgctgctctttctgtctctcagccgtccggtacaccaccgggaaaaaacacatggtaatgatcgtgatgaaaatgattcccgcgatcgctatgataatccgcttgctgctgtttacggcattgctgttgttgctgctgttgccggcaccgttatttctgctggcaccactgttgctgctggcatcgttatttgcgctgacattgttattgccggcaccgttgtttctattgttgtttttcaattttatatccaacaccccacaccacctttaagtattttggatctctcggatttatctcgatcttatcccggatatttctcacatgtaccataatcgtatcggtattgatcgccttctcgttccacacacgctcatagatctcgtccgtcgaatatacacgccccggcgtccggattaaaagcgcaagtattttgaactcaatcggcgtcatcttcaccggttttccatccacaaacacctccacggtgtcctcattcagttccagtcctccgatcacatgaatccggtcgttcttttcctccttcggactcctgtttgcaaactgcgtataccggcggagctgggaattgacgcgcgccatcagttccaacggtgtaaacggcttggtcacataatcatccgccccgatatttaatccgattaccttgtcagtctcctccgattttgccgagagcataatgaccggaaagtcatatttttcccgcagcttcatggtcattgtaacgccgtccatgcgcggcatcatgatgtcgacgatcgccagcgagatcttctcccgctccatcacctcaagtccttccacgccgtctgccgccttgaatacgttgtaattctgactctttaaaaagatttcaattccgtccctgatttctttatcatcctcaacaattaaaatgttatattgttccatttttccgctcctgctcttgttctcttttctgctatcataacacatccgccgcagaatcacacgcctccccgtgcattgattacattttacctgatctgccgcaaaattccccgcagaaatacccgaagaatttctaaagaattatttagaattattatcttgacaactgccacttcgtagtgtatagtagtacaagtgctgaggcaactcacacagatgctgctgtggctcagtcggtagagcgtcgcattggtagtgcggaggtcacgggtccgattcccgtcagcagcttcattgagaagaagcgcaaatccttgaatgaaagggtttgcgcttttttgtgctatggtgttacagtgttacggtattatgacgaatgtattgtgatggaagtctggatgagggggggaatatacgtttgaggcgttaatgctatctcgtggccaagggaaaagtaggaaaactttttctcgtcctgcgggtctcaacgatacttttctactcttggacccgatttttgcttctatgcgggtctggttcgcactttttctcttctcagacccggattgttctttccttctggcattatgtcaacctttttccattctttctgggtctggcacgcactttttctattctgggacccaatttttgcttctatacgggtctggttcgcactttttctcgtctcagacccggggtgctcttcccttctggcattatgtcaacctttttccattctctacgggtctggcacgcgatttttctcctctggaacttcgccttttccttctatcagcccgggattccaatttgcttgacgattcttcacacatttttcaacactgcttcatacctttttcacatttatccggtatcttaatcattgtcaagaggaaatccccattgacacaatttctttttcataatatggccggtaagtaccccacatcttaccgacttctccttctttttataaaatgataaacgtacaaaacgcctcaccatccggtgaggcgttttgcgtattcctgttgaatacccagattctgtcaacttctcctttactacatgcgattcatcatcttaatgtgtgacttgaacagggaataatatttcattcccttgtctttgccatagtgcccctgcaatgctgcgcggagagaattgagattctttcgctttccgtttgcctgatagaggaatcccgaaaaatcttccggcggttcctttgcatattcactgtggtcaaaaaccattttgcagtacatgtcaaacttttcttttaagccataagccggaagttctgaccagtaagacgcatactctgcattcgtcttcagttcctgatacagccgcttgccttcttcctcgccgagaagcgcaaccagtgcattgtgaaaatccaccagattttccttgctgatgcaggcacacaatgtctttaaaattgctctctctgcattcagatccagtccaaactttgctggcgcttcgctctgacccgtagcatttgacacactctgtggattctctgacatttcttctttcaaatccatcattgctgtcatctgtccggattgttcctccgtcagatccggcttctcattccctgcgttctgcgtctttgctttgtcactcttctgtgacttttccgaacgatccggttctgacatatgctcagacttttctgctttgactgctttcgctgactttcttgaccgttttgccctgccagtcttctctgccggctcagccttcccggattcctctgccagcccagcgttttcttccggttccgacttcccggatgtctctgcatcctcagccttcccggtcacttccggcttcccggattctcctgccaacccagctttctctgccggttcagccttcccgaatttctctgcatcctcagctttcccgatcacttctgccttcccggatgtctctgcatttccagccttcccggacgcttccggcttcccggattctcctgccttaccgccggctttcgacggttctgacttcttggatgaccgtggcttctttgactgctctctgccacgctctgcttccgcttccgggccaatctcccgaacctgctctgcttccgcttccggtccggtctcccgaatccgctctgcttctgcttcctggccggtctcccgaacctgctctgcttccacttccgggccagccgctctggtctgttcctgttccggctctgctgctgccccggattcctttgccacgcgctgctttttctctgtcagcattctgtggcattcctttccgcttaaacggctcacaggcattttccgcgttgaccagtagcgcaccgcagcgtcaaatcccgtatcatttgatacaatgacatactccctgtccgcgttctggctcaggcgatagccaagttccgataccagctggaaatccagcgcattgcttccctcaaaacacttaataaagtctgcttccttttccgtctccttgagcatcctcacattttcgtaattcatatgcgggctctttgtcgtataaaatacaagaacctcgtcatcttcctgcgaggataccagaagcggcacccatatatctcctacattctcactgtcaaccaaataaatttttcccattcattttcctgctgacagaatccttttttattgtaccacattccgcttttatactgcaatgtcgtttttccgctgacgcttcttcactttcccgtgttctgttttataaaatatcgatgtactcgcccgcaagcgccttgttcatgctgcgcaccgcacagaattttccgcacatggaacaggtgtcctcgtgctccggtttgcggtcctcgcggatctgttttgcggtctcgggatcaatcgcacattcccactgtgcatcccagtccagcacgcggcgtgcgtctgccatcttgtcgtcgatctctcttgcgcaccgcacgcccttggcaatgtctgccgcatgcgccgcaattttcgatgcaatgatgccctgcttgacatcctccacattcggaagcgccagatgctccgccggtgtcacatagcacaaaaatgcagctccgttctgcgcggcgatcgctcctccgatcgcggaagtgatatggtcgtaccccggcgcaatgtccgttaccagcggtcccagtacataaaacggtgctcccatgcagatcgtctgctgaatcttcatattcgctgcaatctgatccatcggcatgtggcccggtccctctaccatgacctgcacatctcttgcccatgcacgctttgtaagttctcccagccgcaccagttcctcaatctgacacacatcggatgcatccgccagacagccgggtctgcaggcatcgccaagggagatcgtcacatcatgctcccggcagatctcaaggatctcatcgtagtactcgtaaaacggattctcctctccggtcatacacatccacgcaaacaccagtgaaccgcctctggatacaatattcatttttctcttatgtttcctgatctgctcgatcgtcttgcgcgtgattccgcagtgcagcgttacaaaatccacgccatcctcggcatgcaggcgtaccacatcaataaaatcctttgcggtcagtgtcgcaagatccctctgatagtgaattacagaatcatataccggcacggttccgatcatagccggacattccgccgtcagttttctccggaacggaatggtgttcccgtgcgaggagagatccatgatcgcatgcgctcccatgtcaactgccgccatcactttttccatctccacgtcataatccttacagtctctggagattccgagatttacattgatcttcgtccgcagcatcgagccgacaccctccgggtcaatgcatttgtgatgcctgttcgcgcagatgaccacctttccctccgcaacgagcggcatcagctcctctgtggtcatacgttccttcgccgcaaccttctttaactcctctgtcacaattcccttgcgtgctgcctccatctgtgttgcaaactgttccatatttttttgctccatttctgcagagggtgtacgaaaaaatccggcgtcgcagtgacgccggattccacaaactatctgatccatcattcgctccctacgacagtattaactgacaggttccaagagtcaggttttaaccttctcaaccgtttgcgcatgcgcacagtccctctgcgatatattctttttcctctaacaccttatctcaattctatgcttctgtcaatctccctttcctcagaactgctcttttccataacaaaaaaagaacagccatcactggctgcccttttaggagaaggtatttttactatggggtatagcaaaaactatatataatgtattggggggtttttacggttattatagtaccatgactgcgcaaagaagtgtgcacaaacttcacaaaacttctatttcatttctatacattttatacagtaccttaggactagttcttttgtttccgcaaaattttgcataaccggttgttcatttcccgctcttttttgcaaaatgtcctttttgccttctctctatctctgccggatctttcccttgatacgcgagagagcattgtcgattgtcttaggacttttcccgagttcctccgctatctggcggtagttttttccttccaaatatgcgtctaaaacctggcgctcgagcgcgcttaactgttcccgcagctgctcccagaaagcggtaaaattctcctgctcaatcaccagctgttccggatcgtccatctggtcggtgagaagcgtctccgccagagatttcccttcctccgtggtctgggaataaaaagacacatacgtgttcaaggggacatgttttttccggttggacgcctccaccgcgctgtagagctgtcgattgatgcacagctccgcaaaatggaaaaaggatgcctccctgtcagaccggtaatcccggatcgccttaaacaatccgatcatcccctcctgaatcagatcatccgtatctccgccaatcaaaaacatcgcatttgccttgcgaagcaccaacggcttgtacttttcaaggatataatccatgatccgctcgtcgccttcgcgcagtttctggatgagttcttcatccgccagcttctgatattcgtccacgtcttcctccgtcttccctctctgctctgctatgccgcccaaacgttccgcgcccggctgtattttccgcagcataaaaatctgtccgcctatgcctgctttgtcatcttacatcatccgctgtctgacgatctcataggcaagcacaccggctgctacggaagcattcagagaatcaatgtcacccttcatcggaatggaagccacataatcacagttttcgcgcaccagcttgctgacaccctcgccctcgcttccgattacaagaccgatcggtcccttcagatccaggtcatacatctgcgtgccgcccatatccgcgcagacaaaccagatgccctgctcctttaactccttgatcgtcgccgtcagattcgtcaccttcgctaccggcgtatagtttaacgcgccggcggacgtctttgccacagtcgcggtcagtcccaccgccctgcgctttggaataatgaccccgtgtgctccgcagaggttcgcggtacggatgatcgccccgagattgtgcgggtcctcaatattatccagcagaaaaaggaacggcggctctcccttttctcttgcgatctccagaatgtcgtccacttccgcatattcatacgctgccgccaccgcgatcacaccctggtgtttcttcgtctccgagagctgatccagacgttctttttccacaaaatgaataatggtatcatgcttttttgcctctcttacgatcgtgcgcaccggtccgtcctgacagccgtccagcacaaaaagcttgtcgatcgtcttgccggaacgaaacgcctcaagcacagcattgcgtccctctatttttaattcctcgtatcccatgtattctccttttctctctgcttccggcagactctttctgctgcctgtagcatcctctgcctatggcagacgctctatatttccgccttctgcttcctctgactacggcagacgttctataacttcaaatgcagcccgtccacaccggtctttaccagttccaccaggcgctcaaactcatcctgcaagtacagccatcccatcagcgcctcaaacccggtggccttgcggtagtcggacatcgtcgcattctttgccatcgtcggcgacttggcatttctgccgcgccggtaaatgtccgcttcctcctctgtcagaagcggcagaagcacctccatcatctcggcctgcgtgtgcgccttgacaatctggctggtccgtttgtgcagttctcccgctctggtattcccttttcccacgacaacagaacggatgacgagatcatagatcccgtcaccgatataagccagtgtcagcggtgagtaggtgcggatatcgacttccgcaatcccgaactgttccttaatataagaatcgattcctcttcccataccagcttcctctccgactcacgctttatgccagatcacaccctcgcgtgtgtcctttaacacaattccttttgccagaagatcatcccggatcgcgtccgcctttgcaaaatccttctccttcttggcagctttgcgctcctcgatcttttctaaaatatatgcctcaagctctgcatccacctctgtgtcttccgccggattctccaccttcgccgtcgtcagattcaaggagagcacgcggtcaaaatcctccgccagtgcgcgcttggtcgcatcgtttaaggtatcatccttgagcaggtcatagacgattgtaatcgccatggaagtgttcaggtcattggaaatggcatcacagaatttttccttgtactctgcaaatttaccctcatccactgtgccgtccgccttcagatccgcgattctcttcacaagctttttgtaggcaacgctcatgttgtccagcacctcgtaggaaaactcaagcggctttctgtagtgggactgcaggcagaacatacggtacacgatcggatcgtatcctttttcctgcagaagcgacaccgtaaggaaatcccctttcgacttgctcatcttgcccgacttgtcgtttaagtggttcacatgaaaccagtaaccgcaccacttgtgtcccagatagctctcggactgtgcgatctcgttggtgtgatgcgggaaaatattgtccacgccgccgcagtggatatccatatattcacccagatgcttgatgctgatgcaggaacactcgatatgccatcccgggtatcccacgccccacggactatcccatttgagcgcctgatcctcgaatttggactttgtaaaccacagaacgaaatcatttttgttccgcttattgacgtcctcctccacatcgtcgcgcacaccgactaacagttctttctcgctctgggaagaaaaaatataatagtcgtccagcctggaagtgtcaaaatagacatttccgcctgccacataagcgtagcccttctccagcagcacctcgatcatgtgaataaactccgggatgcagttggttgccggctccacaacgtccggacgcttgatatttaactttttgcagtcatcgaaaaacgcgtccgtgtaaaacttcgcaatctccatcaccgtcttgtgctcgcgcttcgcaccttttaacatcttatcctcaccggtatccgcatcggaggaaaggtgtcccacgtccgtgatattcatgacacgctttacatcgtagcccacatagcgcagtgctttttccagcacgtcctccatgatgtagctgcgcagattgccgatatgcgcgtaatgatataccgtcggtccgcaggtatacatggcaatctttccatcctcatgcggaatcaccgtatcgatatttcttgtcagtgtattgtaaaatttgaacttattctccactttggtattctccgtttctttttattcttattattcctgtgacgctccggctcccgcgcttaaaattcgcacttctttctccagatccagcacacggttcaccagttcagcattctcatgctgcagcacggtgatatcctccttcacagggtccggaagatgcacctgatccatgtcatcctgcggtgtcctgatattgtcacgctttacaacgcgtcccggcactccgaccacggtgcagttcggcggcacttcctcgatgacgacgcttccggcgccgatcttggaattatccccgaccgtaaaagaaccgataatcttcgccccggcactgatcatgacattgttcccgatcgtcggatgacgctttccggtctccttgccggtaccgccaagtgtcacgccctgatacagcgtcacgttatctccgatgatcgacgtctcgccgatgatgacgccgcttccgtgatcgataaaaaatcccttgccgatcgtcgctcccggatggatctcaatgcctgttttcctggctgcgcgctgcgaaataaaccgcgcccagaaataatgccctttgagataaagcttatgcgcccttctgtagcttagcataacatgaaatgtcggataaagcaaaacttccatcggacttttgatcgccggatcgcgttccttgattacctgaaactcttccttcatataccttaggatacccatctcttcccattcctttccacatacaaaccagaacaaagtttcctattacaaaaaaaggatcatccgtctcctagagacgaaatgatccgcggttccactctactaaaatcatatgatttcacttgacgcatgtaacgtatgccagacgtacccggctacggcatccctgcatcctgcggtgcagatgactctcgccggatcagctcacggaggcacttggggactctctcttccaagactgctttcagccggtgacagtctctctctgacgaatgtccgaatccttactctttccgatcttcgcttttccaattcatctttttaccggcagaagatacctctcctgcctactatagtttatgcacttcctgtgtttttgtcaatcttttttcactgcatgtttcgtctgcagccgcctgaattcttcttagctcattgtacgcttcgtccgcagccgccgcagcccgcgcagcccgccgcagagtccgccacagtaaaacttccctcataaaaactggaaagcgcgcagatcgcctgtgaggaaatcccttcctccgttccggtgaagccaagtccctcctccgtggtcgccttgacattgacctgatccgtgctgatgccgagcgctcccgcgatgttttcctccatctgcgggatatgcgggcgcatcttcggcttctgcgcaatgatcgtggcgtcaatgttctccaccacgtaacccctctcccggatcagctccgccacatgggagagcagcttcatactggaaattcctttatactgcggatcagtgtccggaaaatgctttccgatgtcacctaatcccgccgcgcccaaaagcgcatccataatcgcatgaagcagcacatccgcatccgaatgtccgagcagaccaagcgtatgcgggatcctgacaccgccgatgatcagatctctgccctcaaccagtttatgcacgtcgtaacccattcctactctcatgataccctcactttcaagccttttcctatgaaagaacaaaaatccccggacacacaactacttgtattcccgaggactctctagtagcggaagggagatttgaactcggtatcaaaccccgcaaacccgcataaatactaggtttctttacacctaaaggtgttacctcgtgttaccttttacatcgatagtgctttcgcaatgtattcttgcatctcactctctgttttattattaaaataataatggtcaagcgttgttctaatatcagtatgacccatttgtgtttttattacagattctggaacatttccatctatgagctttgtagcatatgtctttctcgccttatgaattgatcgctcaccaattttaactttatcgcagatcacatataaacgtcttgtaaatgcttgtccttttatccttttaccgtttttcataaaaatatattctccgaaagggttaagcatttttatttttctcataagttcattggtatcttcggtaattataacatctctaaatccggcatcgctctttggaaaattctgaacatcaaacacatatttgccactatcatctcggtatcgtatttctgtctttgatatatgtatcttattttctgcaatatctgaccatgaaagcgtggatatttctccaacccttagtccggttttaaatgccaaaataattccaagttcaatcaatgtaggctggtcttccattatgaattgttcaatcaaaagctcttcatctttagaaaaaactaattcgttgtcagacttatgattccttttaaatgacttctccgaaatttctaaatcacccatgaaattggttatgctcaagctagtataatgttttttctttgcatatttgaaaattccgttaatcaatatccgcatatcggagtacgctttctgcgtaagttccagctttgaaatagctgtttttatgaatgattccaatatttcttcgtcaatataccggatttttctatttgcaatcggcaaatactcattttcaaaaaatcttttaaaattcgtttcgtacttgtcctttgtctgccttgttatttcaccatattccaatttttcagaaatccagctagaatatacttggctgattgtcggttcatcttccatggctttataaaacttcactatctcgtcctctatcgccttttcagatgttctttttacaagttttttccctctctggctttcttcgtcgggcaaatatgtgtaaaacttaccgtcttttccttcccaaatgctgtagttgtgtttttcaataaatttcttccttttgttcatctcaatttttttctgaatggtgtctatgtcgataataccattttcaatggcaaaattcaacaattcactcttagaaagattttccgtttaaatcaccttccaatctcttaactttttgctttatatcaaagatacgcctttctactgttcttagcggaatacaaattttcattgatatttcttttggtataaatccacgggcaagaagagaaaatatttcctcttcctgctccgtaaaattggcgttttcaataatttcttcaagctctggcttagtcagttttgaaaacttcataagccaatatcctccaatattttattcttttccctgccaaatcttcggtgtaccatctgcgttaagcataacggtacatccattaccattccgctgatacaccagatacatgacgcctgtgtctttgtccgcataaatactgtaatcccgccaaccttctaccaataccattgtattttcctgccccgcactgacgtttgccatgtcactgcacccggcgatcagaagtgttgccgttacgatagctgctatgattttctttttcatgatccgcctccactaatctaaatagtctctcatatcgtccacggcatctgctaaaaatccatcaaatatttcatcgaccttcgcagcaagttctcccgagtaaccatcctcctccatctgcgcccgaaaatctttctgtgagcactcgagaagaccgttttctcttcttgcccattcctttttgtaaattgttccattcaattccaacgtctcattaacaccgttttctgttgtttctactgtatacttcatctttccctctctttccgccccgccgcattactgccgacggagctatagctgtttgatctcatgcaaaccggagctgtccggtctgcttaaaataaactcatctgattctcgtcgtactgataaaagcgtcctgtcgtgatcctccctgtctgacgcaatctctccacccgcggcttctgtttcagactcgccatataattcacatcgacttccggcggaaccgcaaaataatattcatccggcagcggcaaccgattctctgtgcagatttcccggagctgtcgctgatagtaaataatgtggttccgtgtcagattcatgttgcacccatccggccagaacggatcactgcacccgttctgattgatatctttccagtgctctatttccccgtggatgcactgacaacacccttttattttatcttctgctgtctgattcatggcatcacctccgggaagtctgcttcaaacgacatttgcgtatcagcgtaattcaaccacaaaacttcttccctttttactcccgcttctgccagggtggacagagctgacgatcctgatcttgcagagaagatgaaagctgaagccgagggtatcttcctgtgggcatttgaaggcttgcagcggcttgttgccaacaactttaagtttacggagagtgaccgcatccgtgaaaatcgggaagcggtcaagcgtgacaacaacaatatctttgatttcatggaatcagagggatatatccggcgcaaagcggatgcgtccatcagctccaaggatttctatgaaatctacggagataggacagggcttcgctgactgcctttaagtcctgtgaagtcccccggttctgtccagcccttgtccagtccttccgttcttcctttcgtatctccatatacttcatcagcagattgggaagaagtgtcgcttcctccgccgctttttgtgcaagcaactccttccgtttttctcccagctcggcaatccagcctttgaggttgtggataagctgccggatggacttcatcaggcggttggcggctctgatttcccggttcaggtttccgatattcgtctggataccacgcttttccatctgccggacagccgctccctcatggacagtggggactatatcaaacccctgtctggcataggaacgcaagtccacacgctccgggcggtcattggcttccagatagcggttctggatgacctcccattcatgccgccagatttcacaatatttctggtcgttccagtccaccgtatcctccttgtggcttttccacctgccagatggcagctttatccgttccccattctcgtcaaggtcataaaccttgcggctcttgggaagccatttcccatgttcgtccattgccctcatagtcagcaggacatgggcgtggggattgtgtctcggcggatgagggtcatggatggcaaagtcagcaatcatgcctttggaaacaaactgcttctggcaaaactcccggacaaggacagcatactggtcgggcggtatctctctggggatggtaagcacccaccgccttgcaagctgggagttccattgtttttccaccgcttcggcggcgttccacaagtatcatcggccgcttaggtcttaaccatcgtgttcgggatgtggacgggtgtttcccctaagcgcatcgccaccagaaatataaagttgtcattcgtatctgctcctttgtactcatgactcgctcgattccgctccgcttcatctcactagagtcattcgtccaatctgtcttcgcttcaacatcggcttgcaaataaatttgcaccgttgtctccgctcatccaggcagatactcattgataactaaacagtgaacaaactctttacttgatttccttagaaaggaggtgatccagccgcaccttccgatacggctaccttgttacaaaattattcgatttcaagcaatttttaaagacacggtggaatttacctgtgcactggaatttaaaatttcaagtcagctctacatcagctcccggatctctcccgaccggcaatactctgcacagtcgatcacccgctggttggaagaccccttaaacagcagggatatatcatgaagctccgtcacaaacggtccgtccaccagcacatcgatcatgtgaagcagctccgcggtatctgcggtacagcattttccgcccggcacaagatcccggtctaacacatagccggtgtaggcccacacatccttccccggacactccgccttcactctccgcataaacggaagcagcgccttctgattctccggttcaaaaggatctcctccgagcagcgtcagtccccggatgtaatccggcttcaaggacgcaatgatctcatcttccacctctccggtgaaaggattcccgtattcaaaagcccacgtctccggctgaaaacagtctttgcagtgatttctgcagcccgacacaaagagaacggtgcgcacaccggttccgtttgcaatatcacaatatttgattgccgaataattcatatcttttctcctcaacagggaaagaaagactgtggctgcacaatcccgtgcacaccacagtccccctgtttttataaatgtaatacccgttccttgatctcctgtgttctgccctgattccagaactgcgttccaatatagccgcaggtacgtcttgccacgctcatcttgttctgatcgcggttgccgcagttcgggcactcccataccagcttgccgtcccggtctgtcacaatcttgatctctccggcatatccgcactccatgcagtagtcactctttgtattgagttccgcatacatgatattttcatagatgtactgcatcacggaaagtaccgcttccagattgttctgcatattcggaacctccacgtagctgattgctccgcccggggacagttcctggaactgtgactcgaactttaacttatcgaacgcgttgatctgctctgtcacatgtacatgatagctgtttgtgatgtagttcttgtccgtcacacccgggataatgccgaaacgcttctgtaagcattttgcaaacttgtaagtcgtcgactcaagcggggttccgtagagactgaaatcaatgtccgtctccttcttccacttggcgcatgcatcattcagacgacgcatcactgcaagcgcgaattccgtgccttccggctccgtgtgggatacgcccttcatatagcgtgtgcactcgcagagtcccgcatagccgagagaaatcgtcgagtaaccgtgatagagaagttcatcgatcgtctcgcctttcttcagacgtgcaagcgcaccgttctgccagagaatcggcgccacgtcggaaggtgttccctttaagcggttgtggcggatcatcaatgcctgatagcacatttccagacgctcatccatgatctcccagaacttcttctcatctcctccggaagagcatgccgcatccaccaaattcaatgtcactacgccctggttaaagcgtccgtaatacttgtgctttccttctttataattcttggcatgtgccagattgcccgtcgtgcggtctaccgtcaggaaagaacggcatcccatacaggtatagcagtcgccgtcttttaactttttcatcatcttctcagagatataatccggcaccatgcgctttgcggtacattcagccgcaagcctggtcaggtaccagtatttggacccctccctgatattgtcctcctcaagcacatagatcagtttcgggaacgccggcgtaatataaacgccctgctcattcttgacccctaaaatcctctgatgaagcatctcctcgatcactgctgccagatcgtcccgaagctgtccctccggcacctcatccagatacataaacaccgtgataaacggagcctgcccgttggtcgtcatcagcgtgatgacctggtactggatcatctgcacaccgcggttaatctcctctttgacccgcatttccgccatctggttgactttctcttccgtcgcctcgattccggcagtctcaagctccttgcgcacctgcttgcggaacttctcacggctcacctgcacaaacggagccagatgagaaagggaaatactctgtccgccgtactgggagcttgcgatctgcgcgattgcctgtgtggcaatattgcaggcagtagaaaagctcttcggcgtatcgatcatcgtctcgctgatgaccgtaccgttctgaagcatgtcctccagattgaccagacagcagttatgcatgtgctgtgcaaaataatccgcgtcatggaaatggatgattcctttctcatgcgcctctacaatctccggcggaagcaggaatcttctggtgatatccttgctgacctcaccggccatataatctctttgtacgctgtttacagtcggattcttgttggagttctcctgttttacttcctcgttattgcattccagcagacttaaaatctgctcatcggtagagttggacttgcgcaccagttctctcttataacgataagtaatatagttgcgggcaacattaaacgctttctgactcatgatctggttctccaccatatcctgaatctcctccacactcggggagcgcttcatattctcgcaggctttctcaacattggaaagaatcgcctgaatcttgtcgtctccaagcttttcataatcaatgacgctgtcgtttgccttgcggattgcagcctcgatcttgctgatgtcaaaaatgtcctcgctgccacttctcttaataatcttcataaccgttcagaatcctttctgttaattgctttttcattatacaatatctagtattgttgtcaatgcgttttcctagattctgtggttattttaccttttgaacaaaattaacaccaaaacttcgtcactttttattgttttggtttacaacaacatcttgtgtcttctgctattgtcacatccagattttgtagcatctgatccaagcagcgcttcaggtgctccacatcctcctccgaaagccccgccgtcaggcgcgcttccatctcccgtatatcgcgctccgcgccatccaaaagcgcagcggccttatctgtgagcaccagacgttttaagcgcgcgtcgtgtgagacctgggcgcgctcgatcagcccctttcgttccatcacggcaagcatattggacgccgtagctctcgagaccgagaacgcctcctcaatgtccctctgatagacctcccggtctgcgtgatcctttaaaaagccgagcgtccagcgctgcattcccgtcagattgtcctcgttttcctcccgttttgcttccatattcttatggagctggttgtggagcaggcgtattttgtatccgatggtctccgaccttttgattcgttccatctcttcctctcttctgtctgttttctaaaataatcattgacttctgtttttaattatcgtataacattattgttagcacactaacaattaaaaatcaacagaaaattcaaaaaggatgtgaaattatgttaaaaacacttggagcacagatcagggagttcaaaaaagattccctgcttactcccgtcttcatgattctggaagtcttcatggaaacaatcattcctctgatgatggcttccattatcgatcagggtgtggaagcgggcaacatccaccatatctacgtcatgggtgcctggatggttgtcgccgcctgtttctccctcttctgcggtgtcatgggcggaaaatacggtgcaagagcctccgcaggttttgcacgtaacttaagaaaagcgatgtacgagaacatccagagtttttcgttttccaacatcgacaaattcagtaccgcaggtcttgtcacccgtctgaccacagatgtgaccaacctgcagaatgcctaccagatgctgctgcgcatgtgtgtgcgtgcgccgatcagtctgatctgcgcgatgtgcatggcgtttttcatcagcccgagactggcgagcatctatcttgttgccgtcatcattctgggcatcattctcgccatcatcaccgtgcgcgcgcatcactattttatggaagtttttccaaagtacgatgacctaaatgcctccgtgcaggaaaacgtatccgccatccgcgtggtcaaggcttatgtgcgtgaagattacgagaaaaacaagttccgcaaagccagccagaatatttacaacatgtttatcaaggcggaaagcattctggctttcaacaacccggtcatgcagatcaccgtttacagctgtattcttgcgatcagctgggtgggcgcaaaaatgattgtcggcggaacattgacaaccggagaactgatgagtcttcttacctattgtatgaatatcatgatgagtctgatgatgctgtccatggtgttcgtcatgctggcgatgagtgtggcaagcgccgagcgtatctgtgaagtattaaatgagaagagcgacatcaccaatccggaaaatgcggataagaccgtgccggacggaagcatcacctttgaccatgtgaccttccgttacagcaagacatccgcaaagccggtgctctccgatattgacctctccataaaatccggcgagacgatcggtatcattggcggaaccggaagttccaagtcctcgctcgtcaacctcatcagccgcctctacgatgtgtccgaaggccgtgttctcgtcggcggaaaagacgtccgttcctacgatcttgacaccctccgcaacgaggtctctgtcgtattgcagaacaacgtgctcttctccggaaccatctatgagaatctgcgctggggagatgcacatgcgaccgacgaagaatgccgtcacgcgtgcagactggcatgcgccgacgaattcatcgagcgttttccggatggttacaacacctacatcgagcagggcggaaccaacgtctccggcggtcagaagcagcgtctgtgtattgcccgcgcgctcttaaagaagccgaagattctgattttagacgacagcaccagcgcggtggacaccgctaccgatgccaagatccgtcgcgcttttctcacggagattccgaacacgaccaagctgattatcgcacagcggatctcctccgttcaggatgccgaccgcatcattgtgctggataacggagagttgaacggtttcggcacacacgaagaattattgcagaccaatgccatttaccgcgatgtctacgagtcacagaccggcggcggcggtgattttgatgaaggaggtgctgcctgatgccacagaatgaaaaaaatgcaaagccgatcggcggacctggcggccgcggcggtcatggtccaagaccgaatgtcaaaaatccgggaaagctttttatgcgcctgctttcctatattatgaaaaattatgccgtacactgcgtcattgttgtgatctgtatttttatcacggttctcgcaagtgtgcagggaacctggtttatgcagaccttaatcgacggctatatcctgccgctgatgaagcagagcgatccggacttttccggtctcgcacacgccattttacgcgttgccgtcttctacggcatcggcgctatcgcagcctacatatacacaagaattatggtcaatgtctcacagggtactttaaagcatctgcgcgacgacatgttcacccacatggaagagcttcccatccggtattttgacacacactcccatggagacattatgtcaacttataccaacgatattgataccctgcgccagatgatcagccagagtatgccgcagtttttgaacagcatcatctccatcgtgagcgtctttatcagtatgcttcttctcaacattccgctgacgctcgtcacacttgtaatggtcggtgtcacactgtttgccacaaagaagatcggtgccttaagtgcccgctactttatcgcacaacagaaagatattgcgacggtcaacggctacattgaagagatgatgaacggtcagaaggtggtcaaggtcttcacccatgaagaggaaagtatcgccgatttcaaccggctcaatgaccagctgttccacagtgcagacaatgccaataagttcggtaacattttaatgccggtcaatgcacagatcggtaatatcagctacgtgctctgcgcgatcgtcggcggtattcttgctctgggcggatatggcggatttacgctcggaaagctcgcaagttttcttacctataataagagcttcgggcagccgatcaaccagctctccatgcagcttaacaatatcgtgatggcactcgccggttccgagcgtatcttcgctctgctcgatgagcagccggaagtggacgatggttacgtcacacttgtccgcgccaagtgggaaaacggtcagattgtggaatccaaagagcgtacgggtatgtgggcatggaagcacacccatcaggcagacggcagtgtcgattatattgaattaaagggcgacgtggtatttgatgatgtcgatttcggctatgttccagagaagaccgttcttcacaacgtagatctctacgctacgccgggtcagaaaattgcctttgtcggcagcaccggcgccggaaagacgaccatcaccaacctgatcaaccgtttctacgatatccaggacggcaagatccgctatgacggcatcaatatcaacaagatcaaaaaagatgacctgcgccactctcttgggatcgtgctgcaggacacccatctttttactgctacggttatggaaaatatccgttacggcaagctggatgccacggatgaggaagtcatggcagctgcaagactcgccaacgcagatacatttatccagcagcttccgaacggctatgacaccctgctgaccggcgacggtgccaacctaagccagggccagcgccagctgcttgccatcgcaagagctgccatcgccgatccaccggttctgattttggatgaagcgacaagttccatcgatacccgcaccgaaaagattgtgcaggacggtatggataagctgatggcgggacgcaccacgttcgtgattgcgcaccgtctctcgaccgtgcgcaacagtgactgcatcattgtcctggaacagggacgcgtcatcgagcgcggcagccacgatcagctgattgaaaaacacggcaaatactatcagctgtataccggaaatttagcggaaggctaaattcccgtgtaatcccagcggaagattaagttcctgaaaaaatagaactgtcgcactaagcacagcgtgctttgctctgataagtaatattacagagatatcagagaacaaaaaagttccagaataaacagacggcggcagattctttgaagcaaaattcatgtatttcttccatgccgtgactggcatcccgttctgtgtctcttccacgtttgaacactcacggagtgtgtccgacaagccgcagacaatgggcggactttctggtgtccctaatggcacctcttcacagacaannnnnnnnnnctcaccggcatctgctattgaaaatagggcagatgccgactcagacagcggcttcgcgcggttatgttttgttcagaggtgccaataagggacacacacgaaagtcctacaaattgtctgccggcttgcggacacagtccgtagagtgctccaaacttggaaagacacggatcatcacagatgccagctgcggcatggttagaaataccggattttgcggtcagaatttgccgccgcatgtttatctggaacttttaagtatctatttctcataatattacttatcaaagcaaagagcgatatgcttattgcggcaattctattttataaaggattcctaatctcctcaaacttttcccgaaatccctcgacagtctccccgccggagcagatcttatccgccagtgtcacaatccatgcctccctgcagcacggcggaatcggattgagcggaaacatatgccgacggatcgtctccttctcaatctcactcagttcaaaatcttccatcgcattctgcagcgcttttcctgcatgataaaatccatgccacttatgggaatcgtccttctcatgccagtcgtacagaaaatagtcatgcagtaacgccccgcggatcagcgcatgacagttcacgcggattctatacttttccgcaatgtaaaaactgacgtacgccaccgccacgctgtggcggaatacgctcgtggaaccatgctgcataaaccggctggaggagagaaacctggaatttttgcatacctccgtaagaatctcccgaaaaactttctcattctcttttgacaaatgaatccgcttcttttttctgtccatttcccttaaacacttcctctgtcagatctgataaccaccggatctcattcggctgcatggcaagatcaaaaccacctctgtttcaagtcctacctgtccacttcgattgtgattacaattccatctcccgcatcttcctgaatcgcttcctgcacaccctgaatcacatcttcctgcagcgcatccttgttagtagaagattttgcataaatttttatctccggattgccgagacttctcacatcatcccacgtaaattcagccagattgatcccggtcgggttgttcaaaatctccagatcatccatatcacagtagatttctgtcccgctcagtgtggtcactgccccgaagttctgggtgtcgccgttctcatctacatacttatactgtgtcgtcgtacggcgcatcagacgctcgatctcataggtaatctgcccccatacctgtgatgccatccagtcgtcatcctcgtatgttccgtttgcgaccagatacgtgctgatataccaggagtgggaattgttatatccgtaatcaatgctgtaataatcataggtgtcgtatacgtatccgtctaaagtaggatgattattgctggtataatagtgttttccgtttaccttatcttccttctcggtccttgtgatctcatacccgtccggcaaaaacgatttcaaaacgtcgccgtatttccgctccagatgatagcttttatgatatccgcagccgccaataaggctgactgctgtcagacatgccagtgccactctgtatttgcgatgcaaaaaatgttttttctctctgcttaactgcatcattttctcttcctgtcctatacgttattgtctaatatacttcggcttattttaccatatctaattacaaacgtgcaagtataacgcacaaaaaggaccgcagtccatggaaacatgaactgcgatccttctatgcattacacaatctgctgatcgggctgattatttgtacagctctaccagtctctgtaagtgctcgtaacgagcctttgcagcttcctcggaagccttgaacagtctttctgctctctccgggaatgctctggtcagacggctgtaacgtgtctcattattcaggaaatcctgataagaaccgtcgcccggcttggatgtcagagtgaacggattcttgccctctgccttgagctgcggattgaaggagaagaggttccagtaacctgctgctactgctttcttcatctcatcctggcagtggttcataccaccctttacaccgtgcagctcacatggagcgtaaccgatgatcagagacggtccgttgtaagcctcagcctcagcgataaccttgacagcctgagccatgtttgcaccgagagcgatctgtgctacatatacataaccgtagctcatagcgatctctgcaaggctcttcttgccaacttccttaccagaagctgcgaactggcaaacctcaccgatgttggaagccttggaagcctgaccacctgtattggagtacatctcggtatcgaataccataacgtttacgttctcaccggaagcaagtacgtgatccagaccgccgaatccgatatcgtatgcccaaccgtcaccaccgaagatccatacggacttcttagcgaggtaatctttcttctcaactgcagcctttgcatccgggcatccggctgctgctgccttctctaactctgctacaagagctgctgctgcaggagtatttgcctttgtatcgttctttgtctcaacgaacttgtcaaatgctgcctttaactcagcgcttgccttgtcagatgttgcgcacttctctgcagaagcgattgcctgctcacgaagtaccttctgaccgatttccataccaagaccatgctcagcgttatcctcgaataaggagtttgcccatgccggtcccttcttggaatctttgtttaccgtatatggtgatgtagctgccggaccaccccagatagaggaacatccggttgcgttactgatgtacatatgctcaccgaacagctgtgtgatcagacgagcgtaagatgtctcagcacatcctgcacaggaaccagagaactcaagcagcggctggttgaactgggatccctttacagtgttgtctgccggcatgccaggcttcttgcctacgtttgctaccaggtaatcgaataccggctgctcttctgcctgagactcctgcggaaccatctcgattgcgcctaccgggcagacagtgatacactcaccgcatcccatacagtctaacggagatacgctcatggtgtacttgtactcgcttgccttcggctttgtatctgcaagcttgatgttggaaggagctgccttcacctcatcctcgctcagcatgaacggacgaatggttgcatgagaacatacaaatgcacactggttacactggatacacttctcagcattccatgtcggaacggttacggctgtaccacgcttctcatatgcagcagcgccaagctcgaactgtccgtccgggttctccttgaatgcggataccggaagggaatcgccatccattaaggagatcggctccattaagtctcttaccatcttaacagtcttcggaagacccttaagctctgcaggagctgcgtctgcctccggattcttccaggaagccggaacctctaccttatgtactgcgtctacaccggcatcaattgccttgtagttcatctctacaactgcgtcgcccttcttaccgtaggacttcttagctgcagctttcatgaactctactgcctgatcgatcggcataacgtttgcaagtttgaagaatgcagactgtaagatcgtgttggtacgcttgcccataccaatctcgattgccttgtcgattgcgttgattgtatataactgaatgttgttctctgcgatgtacttcttcgcatctgcattcagatgatgagctaactcttcatcagaccactggcagttgatcatgaatactccgcccggcttaacgtcctgaaccatcttgaatcccttggttacataagacgggttatgacatgcaacgaagtctgcctggttgatgtagtacgggcttctgattggcttgtcaccgaatcttaagtgggaaatggtaacaccaccggtcttcttggagtcatactggaagtatgcctggatgtacttgtctgtgtggtcaccgatgatcttggtggagttcttgttcgcaccaacagtaccatcaccgccgagaccccagaacttacactctacagtaccttctgcagatgtgatcggagccggcttaacctctggtaagcttaagttcgtaacatcatctacgataccgattgtgaaacgagccttcggagcatctttctccagctctttgtatacagcgaatacacttgaaggaggtgtatccttggaacctaatccgtaacgtccgcctgtcaggacaacagtgtcgagaccagcctcacggagtgtggttgcaacatcaaggtataacggatcaccaagtgcacccggctcctttgttctgtcaagaacagcaaccttcttagctgtcttaggaagagcctttaaaaatgcctctgatacccacggacgatacagacgaacctttacaagtccgaccttctcacccttagcggttaagtagtcgattacctcttcagctacgtcgttgatggaacccatagctacgataacgcgctctgcgtccggtgctccgtagtagttgaacagatcatagtttgtgccaagcttctcgttgactttcttcatgtacttctcaacgattgccgggagttcattgtaagctgtgttgcaagcctcacgatgctggaagaaaacatctccgttctcgtgggaaccacgcatagccggatgctccggattcagtgcatgtgcacggaactctgcaactgcatccatgttgcacatctctttgagatctgcataatcccacttctcgatcttctggatctcatgggaagtacggaatccgtcgaagaagttgatgaacggaaccttaccctcgattgtagcaagatgagctaccgggcttaagtccataacttcctgcgggttggtctcgcacagcatagcgaaaccggtctgacgacaggcgtaaacatcgctgtgatcaccaaaaatatttaaagactgggtagctacggtacgcgcggatacgtcgaatacacaaggaagctgctcgcctgcgattttgtacatgttcgggatcataagtaacagaccctgagatgctgtaaaggttgtggtcagcgcacctgctgcaagggaaccgtgtacggcacctgctgcacctgcctcagactccatctctacgactttgacctgattgccaaaaatattctcctgtcctgctgcagaccactgatctacggtatctgccatcgggctggaaggtgtaattgggtaaatagctgcaacatctgtaaacgcataagctacgtgagctgccgctgtattaccgtccattgactgttttgctctggacattattattcctccttaaattaaaatagagtgtcatattccgacttaagactaattttagcatttaatttgtcgattgtaaaggtttcagactgtacgaaaacgtgtgcaatctacatttgtcatgttctgtttgtccctggtcagatatactttttttcaaactcctccaggggcagcgggcggtcaaaataatagccctgaccgtagttaaaaccgcactccatcaaaaacgtccgctgctgctcctcctcgattccctcaaaaatcacctcctcctttgccgactggatgaactgccccatctgatagacaaaagcactctgtccgttctggtggattttgtcggtaaagctcttgtcgatcttcactacattcgccgggatttccaacagcacgctcagcgacgagtagccggttccaaaatcatcgatggcgatgcggtagccgagtttgccaagtctggtaagacacgcctttaagctgtctaacttctccacaatcacactctccgtcacctcgatctctatgtagcacggatcaatcccgtaccgctgcagggtattctgcaggcgttcgataaaatcgtcgccgccgttctcaaaatttctcctggaaaaattggtggagatcgtaaacagttctcttccggaatccctccagcggcgcattgcccgaagcagctgttccagaatataaaaatccagatccacgatatagcctatattttccagtgcagggataaaccgtgcgggagacagaatctcgccggattccagacgccagcgtgcaagcgcctcggcgccgtagacccgctcctcgcggagcaggaacttcggctgtaaatatacctcgaactcgccccgctgcagtgccgcgtaaaatcttccggtaatccggattccctcatcacgttttttcctcatgtcatcccggtaaacgaccgctcccacattctgctccttggcaagctttcgtgccagattggctccctccagtatcttctcaaacgtctcttccccgtcatcgataaagcagattccagccgaaagctgcatggctcccgccggatagcggatctttaactgttcgccaaacatctgatcctctctctccacaagccccagaatgttctttttgtccgttcctctgaccagctcaatgaaataatccgaatacattctacaggcctccacgacatgggactcgctgcggattaacgctgcaagctcctgcagaatactgtcgccggcctcctgtccataattttcatttacataggcaaagttgttcacgtccagatttaccagcgcgtacaccatgttctcatcctgcgcaagcccaccgctctttaattttttccggatcagcctgcggaatgtgtccagattatacagttccgtcagcatatcctgattctgcagatgccgtatctctgcctggtcatcgctctgcctgctgcgaagggagacaaatacagcaaccacccgcgcgagttcactgagcatccctgcttcctctttggaaaatccctctgcactgctgcttcccacacacaggcagccacttctgttaccggaaaattcaaactttacatttccacagtttttgatggaagttccatgatatttctccgcccccaactggggaacctccgttaatatatcttccgttggcgtcgagacaaaacgcccgatttccgcctcccggaacactgtaaccgattgtgggaatacctgttgttccacccggctgccatcccggttccagtaattcatcaacaccatttcctgctgttcttcccggtactcaaacaccatggcaaagcccagcccgtattttttcccaatctgttcgatcagcacgttcaaagatccgttgatatctttcgcatgcgagagaaggctgaacgcaaaattcaggaactctttatccaccttctgcccgctttccggagcatattcaatcctgtcgcgcctgcgctcccgctctgctccctcttgctgctttttgcccgcaaacgaatagtggtcttttccttcccgcttcgtggcatacatcgcccggtcagccatcgcaaacagggtctcataatctcttccatcctcgccgtatactgccatgccgatgctgagcgtcacctcaacgatggcgtcgtcgccgatcagcttttttctggcttcccggcccagcgccgcggcgcacgcttctgcctcctttggagccacatcccgcatcagcgccagaaattcatctcctccgactcttgcggtgacatctgtctcctgaaactggctttgcagcacgccggcaatatcagtaattaccgtatctccgacggtatgcccgaatgtatcgttgatccgcttaaaattatcaatatcgatcaggaacagcacatgctgtttttccggctcactttttaaaatccgttctacctctccggatgccgccaccttattataaagccttgtcagcgggtcgcgcttcgcctcctccgacagttcctcctgaatcctgcggtcggagctgacatcgtagctgcgtccgatgatgcggataatctgtccgttgtccccgacaatgctccggtaaatcgtccggtaccacacatatacaggttcctccccggcagccgccacattcatccggtaatcaatacttcctgtccgcacatccctgctggctgcctccagcaccctggcatacgcggcacgatcctcctcgcagatatccgcgagcatctcctcataatccatatatctgcgccctgccgttcccggctgcccgttcccgcgatatttgcgcggcaccctgaaacgccgctgtgcaacgtcgtactctagcgggaattcatcggtgacctcttctaacatgctgtactgctcctccatcaggcgcagttcttcctccagattcttccgcttgtctatgttccagcttgccaggatatagtaaggtaccgcgtcccggtaataatacagtctgcaccgcatcagttcccagcagacgccgccgctcttcgtacggatgcgcagttcaatctcctccgtggttcttagttcccggcacacttcgatggcatcctcgaacacaccggtatcgtcccggtacaaatactccacaaacggcgtatttccggtcagttcctccctgtcatacccctctgcatgcaaaaattcccggttcaccatctcaatatacagctcattcccgccgcggactaccgctattccgaccggcatcttgccgatcagatcttttctctgcccccgctccatgtctattgtatttatttgcgtatccccatactccataaaatcaatctcctgagatgcaatttcctctgtcatacttaagataactccgattgccttcccgtacattatatcaaatttttaacgaaatccaaacaatttgtcacagcgtgaaagccctttttaataagaagttccggttgcatttctccgtattttttagtatgatacgaattggtgcaataaaagcaggtgatttacaagaaaagttaggagaacataaatatgatcagtacaagcaacatcactttacgaatcggaaaaaaagctctctttgaagatgtcaacatcaaattcacagagggctgctgctacggtctgatcggtgcaaacggcgccggaaaatctacgttcctcaagattctgtccggccagcttgaaccgacgagcggagaagttatcatcacgccgggtcagcgtctttcctttttgcagcaggatcattttaaatatgacgagtacacggtactcgataccgttatcatgggcaacaagcgtctctacgatatcatgaaagaaaaagacgcgatctacatgaaagaggatttcacggacgaggacggtatccgcgccagcgaacttgaagcggagttcgcagatatggacggctggaatgccgagtccgatgcagccaccatgttaaatggtcttggcatcccgacggaggatcactacacactcatggcggatatgccaagtgccttaaaggtcaaggttctccttgcacaggcgctcttcggcaacccggacattcttcttttggatgagccgaccaaccatctggatctcgatgcgatcagctggttagaagaattcttaatcaactttgagaacacggtcatcgttgtttcccacgaccgctacttcttaaacaaagtctgcacaaacattgcagatatcgactacggaaagatccagctctacgccggcaactatgatttctggtatgagtccagccagcttctcgtaaagcagatgaaggaagccaacaagaaaaaagaggagaagatcaaggagctgcaggaattcatctcccgtttctccgcgaatgcttccaaatccaagcaggcgacttccagaaagcgtgccctggaaaagattcagctcgacgagatccgtccgtccagccgtaaatacccgtatatcgatttccgtccgaaccgtgagatcggcaatgaagttctgaccgtcgaaggcattaccaagaccatcgacggcgtcaaggtgctcgacaatgtctcctttatcgtcggacatgacgacaagatcgcgtttgtcggaagcaacgagctggcaaagacaacgctctttaagattcttgccggtgagatggagccggattccggcacctacaagtggggcgtgacgaccagccagtcctacttcccgaaggataacaccgagatctttgataccgatcttctgatcgttgactggctgacacagttctccgagatcaaggatgcaacctatgtccgcggtttcctcggacgtatgctgtttgccggagatgacggtaccaagaaaatgcgtgtcctctccggtggagaaaaagtacgtgtcctgctttcccgcatgatgattatgggaagcaacgtgctgatcttagatgaaccgaccgaccatctggatatggagtccatcaccgcattaaacaacggactcatcaagttcccgggcgttattctttttgcctcccgtgaccatcaggttgtccagaccacagcgaaccgtatcatcgagttcctgccggacggcacctttgtcgacaaggtatccacctacgacgaatacctcgagaatgatgagatggcaagaaaacgtcaggtatactccatgtcatcggatgacgagggcgataactaagacccggtcttttttacaaaatcacacgggagcgctgtgtcaggaaaaatctccggcatagcgctcccgttttctgttcttctaaattctgttttcactcccgccgattccgcgatcctgttctccggcgcccctacgcttccttaggcttccgctactctgcctcccgcataccgagcgcaaacgctcccataatacccggattttctccaagtgccggcggcacgaggtaggtatcgatctcctttaagattttctcattggaaatatacccgcccagcagttcctgcactttcgtgcgcaccattgaaaagagctggctctggtgcataattccgccccacagcacaatcttctgcggagaatacgtcagaacataatttgcaaccgcctccgcgagatagaacgcctccatctcccagacatcctcccggtccgccagttcctttgccggtctgccccagcgcgcctccaccgccggaccgcttgcaagcccttccagacagttggcatggtacgggcattttccggcgtaggtgtctttcgggtgacgctgcagaagaagatgtcctgcctccgggtgcaccagcccgtgcatgagcgccccgttacagtagacgcccacgccaacgccggtgccgacggtaatatagattgccgtgtcgcagtcttttgcggctccccaggtaacttcgccaagcaccgccgcattcacgtccgtatcaaatccgaccgggacgccgagcgcccgtgtaaaagttcccaccatatcgacattctgccattccagcttcggcgtgctggtaatatatccataggtcggggacgcacggtgcagatccaccggtccgaaacacccgattccgagtgacgagattccttttccctcaaaaaacgcagccatgcgcggcagggtaatcttgggcttctctgtgggaatcgtcacacgctctgtgattgtgacctgattttctcccggctgtcctttgtctgtctgcacttccccgatcgcgcacaccatcttggtgccgcccgcttctattccaccaatccgcatccttctcttcctcccttttcttatatataccacttcggagttctctccgccagtcatatttcaaagaaccggaatatttaagagacagcagccctcccggatgaattagaaaattctccgcaccgccagcacgctgcggtaggttaccggagaagtcagcgtaatgcctgtcttttcattgctcgcatgaatcagtgtgttattgcccgcatagatgccgacgtggccgctatagcagacaatgtcgcccggctggatttccgacaggctgacggcatatcccacactccgctgttccgacgatgtgcgcggcagattgattccaaatgccgcatacacgcccttgacaaatccggagcagtcggttccgtttgtcaggctgttgccgccgtatacataagggtttcccagaaactgtctcgcgtaatcgaccaccgcctgaccgttggaggaagccgtctgcgcactttgccccgcactgcttccggaaccgcttcccgcgctgctgccggagccgcttcccgtgctgctaccgcctgctgccgcactgctgcccgcgccggattttttcacctcctgtttttctgccgctttgcgggttgcttcctgttctgctgccgcacgtgccgcctccgcctctctggctttgcgcgcttcctccgccgcacgggctgccgcctgccgttctgcttcctctctggcaagccgcgcctcttcctccgcttttgactctgcatgaatgtactctgtggacagtgtcacataatccagtgccacataaccgtcaccgtccgcggtggacaccttcgcccagccttccgtcgactcgtcggttaccacaacgtcatcgccgtccggcagcatggtaagcaccttcgcctcggttgtcggctccgtccgcacgaacagggtcgtcgttgtgacggtcgccaggcgcgttcccacacttctggcaagctcctcatcccccacgaccacatattccgccttgacatatccgttcacatttccggacgtaatccggtaccacccgtcctccgtcgtctccagcacagtggctgcagatttgtcgtaaagttttccaagaatttcactctccgtatccggttcctgccgcacgttgacatagtgattcacctgcgccactgcaatatccgcaaactccgatgcggtctgcggaagttcattttccgcaatctccgccgtctcccacgcttcctctgccaccatctccggttccatcatccgcgccacagccgcgttactttgcagttcctccacagcatccgccgtctgcgcctgcactcctcccgcttccttaagcacctgtgccagcgtctgtgtcacgcccgccaccggcatctcccgtttttcctgtcctgcctgcaccattccatagcttcccagtgtgacggctcccgccagcagaagcgccagtattgtcattcttttcttcattatgtagaatcctcccgatttattccatatgcttccatattgttacttatttgttacaaaaatatttcatttctgcaacaaccgtattgtaacaaaggaaccacatggaatctacagggaactctttccatttttcgctctcttttgtccggtctgccgctttgtcccgcaacgcaaaaggaacccgcaggttctttcgtccctgcgggttcccttcgtattttccttccggtttaacccaaacttccttactaatagcagaagctgtgtccgccgatctttcggtccagtctcggcgtcaacggttccgtagaaaaatataacgtatcatttcttaatatatgtgtatttccattcaatacctcatgaatcgaagtgtattccttctccgtggggttcgcccgctctctgttcttccaggaacagaactgcgtcgggtttccctgactgagcacgtcatacaaggtatctggatatttttcggaagccatccggttaaaaactacctcgaccacggcttcctgcccttctgtcggctcgccctgcgattccagccagacgatttttgccaacaaatctatctcctcctgcgtcaatgtgatattccagcggttctctgcaccggtcgtcgtctctaccgtcgcaggcttgctctctgccgcctccggcgcctctgcttcccccgatgctgcctgtactttggcttccggtgtctctgcttcctccaggggtgtctgtacttcttctgccgcatcggacggcgccgtgcttgctaccattgttctggggttctttgtgattcctgtcgcttcatctgattctgtcgtaaatgaatatccggataaaacacggcacacacccgcaaccggaacctctgctttgtctgccgcagaaattacatacgcgctgctgatctcttctctgctctcccgtatcgtgttcttctcctcaatgttggccgcaaccatgagacaaatgcataaagtgcacagcattgtcacgtccaatatttttctgttcattttgctcctttcctcaagaatgatactctgtgagctgctctcgcactcgttgtttcatcatactagattcttcccaaaagtcaaattttccattcacaaaattctggaaaaattttctttacattttcccagaaatgcggcaaaagcatgttctgtcgtatccaatacttccgaggaatgctttgatgcgctaaaatagaactgcccaaacgcacaaaaaaaacatcccgaaatgggatgttttctatattccttccaatattcctacacggcttctcctgtcgcaaatcccgccatttttgtaccttttccggcacaatcttcctctgctaccgtgtgagaaataattcttcaaacaccggtattttgtgttccggatctgcctgaaagagcgcaacatgtgcatcgtcggtgctcctgtcggcaaatgccggatataaaaacccgcaggccggccgccccggctcgtactctcccaccaacggagcgactgcaccgatcagatattcatatacctcctccgactccccttgccgctccttgtccgatgcctttaccggcacatcatagcggtcgtgaaaaatcagaatcgcatacggctccctgctacagtaccgggcacccacaagctcgtaaaacgtgtacagcagcgcatcatttttcagtccgcactcgcgcattccgtacaacaactggcgcattttcctctgttctgcgccatccccgaatgcgtagctgcgcaggtttacattggttgctgcaaacggaaccgctttggcaatcgccagatttttctccttttccaccgcagacagattgagaaagttcacattaaaactctcatcgatctctccgtccggctccatatagccgcctgccacacgtgtaaaggaagtgcggctgggcgtcattctgcgtgtcagctccagcatatcttctctgtttatcataatttctcccgtcccgtgtttttatgataacatttcattgccggcacatccatgcttgtcttcaccacacttatgttccgcgcaggaatgctcatgctcatgatgagaacatctcacatcgggattgtaatctaattttcctgcaagataagcttctaccgcttcatctgccgcaccggacactccaccatacagctttatgccggcagttgcaagtgcgctttgcgcaccgcttccgattccgccacagatcagcacatccgcacccgcctccgtcaaaaatccggcaagtgccccgtgtccctgtccatttgtgtcgacaatctgggatcttaccacctggctattctcaatatcatataatttaaactgttccgtgtgtccaaagtgctgaaatatttctccattttcataggtaactgcaattctcatctgatctgtttcctttctttgaatatcatcttttccgacggacgttgaggtgcgcctgcatattttattgcagcaaaacagggcagttccatcacacaatcgataattcccacctgaaatctccaatgtctttccatttacgatgctgtctgccattttgtatctggctgactcataaatttcggtcactgttgtgcgggcaatccccatctgcttcgcacattgttcgtgcgtacacttctcaaggtctacaagacgaatcgtttcatactcatccatcgtcataatgactttttcccttgccggaacaccattcgggcaaaaattatcatatgccgcttccatacagattcttcttgcttttgtcggtcgtgccatcttttctcctcatacctatttccgtcatatgtcaaaaattattatatcgcaattttcttttttttacaactctctatgaaaattatgcgtacccgatatacagattatctgccgccatcacgctgcaatccagtttacaatctgtaagaatatgcaaaacgctcgtattgtgatcccgcctttgcatataacatgaaatgcaacatggcataaaaaaaacaccgaatttacggtgtttttagagcaggggatgagagaatcgaactcccaccaaaggttttggagacccctatcataccatttgaccaatcccctatacttataaaaatgacgtagctagtacgtcatttactatataacagaattgttataattgcaatacttttttaaattgtaccttcaaaacttcacacagaatccatccatcaaacctgcaaacattattcgttatatttggtcaagccctcgatcgattagtaacagtcagctccacacgttaccgtgcttccacctctgccctatctacctttctgtcataggctctcctttcgctgcttcatcagttgctttaagcgttccagcttttcctgtgcggtttcctttcggaagttgctgcccgtgaagcggacgggggcgcacatggaagtcagcctgtcatagatacgggcgtggggcgtgtcctgcgggtgctgcaattcctccagcgtgaggttggtcgtggcgatcagcggcttgctgcttcggtaacggctgtcaatcacgctgtaaacctgttccagcccgtattctgtccctcgctccacaccgaaatcatcaagtatcagcagggggtagctgcaaaggcgggaaatatactcattcctgccctcaaagctggcggcaaggtcattgagtattgttgcaaagtttgtcatgcagacggcaacctctttttccataagggcgttggcgatacaggcggcaaggtagctttttcctgtccccacgccgccccagaacaggtagccgatattttcagcctgcatggtttcccagctctccacataaaaacgggcggttgcggtctgcgggtttctgccgttgtcatgctcaaatgtccagttccgcatagcagggtcggtaaagccccggcgtttcaagtcctccactgtttcaaggtgcttctgtcggctttcagcggcttcccgtttttcacgggctgcccgctggcagtcgcactctgacgggtgtcggtcatgccctaaccattgggcggtttcttttgaaaaataggcttctttgggcgtatggcacttgccgcagtataaaagcccgtcctcgcctgtgtagtcctccgcttcggcggtagtggctgtaatgtccgtaatcatagcttcaatcccgtttctcataagctctcgccctccttgcatgaataatcgggtatgccctgtttcggggcagccttgcctttggcagcgtcctcctgcgcccacttgtaaatggtggctgcatggctgtggtactgcttcccggtggaagcgatatggcaggaaagccggtcaatataatactcccacttgtcgggcagctctgttttcagcccggaaagctctgtatcggtcagtatcacattgttgtatctgccataagcggcaggggtggggtgtcccgtttctccctctctctctttttctatctctatctctttctctaactctatctctatctctggtggacgaatgtcggacaaatgtccgccttttgtccggggcggtaaaagtgctttgttttccagccttgcagcccgttttcgctcggcttcggtagaggactgtcctatcatcagctcaatgtcggtcatatagaaagccccgctgtcaagctgctccacaagccccaactgccggaaaatctctaaagccctctcaaccgtccctatctggtggcgggtcagtgtcgctatcatctgcgctgtgtaggggatatgctcgtcaagctgcaacttcccgccgtttttcagcgattttaagtacagcttcaagaggatattggaatataaaattccgtctttcatatcttccagcagcacaatggagtcgctgtcaaaaaagttctctttcagcttgaggtagtaatacttgcgacgccgattgctacttaccggatcaattatgagacgcgccaggcgatcaatgagtatgtagatgcgcatggattcgggaatagcagggaagcgggggcgttgcagggattgtatgaatcgtatcttgctccgaaccggacaagataatggaaatgaagaaagaggtcgttgcgacgtcgcaacaaaatggaaagaggaagataccgtgaagatatcttcctcttttgctttttaaagttggttaaagtagtcgaaccatgcggctaaatccaatgtcatcaattcttgattcatgcttgccctcctgtcctgttttttcatttttctaattatatcatgtaaatgtaaagaaatctatgtcctcagataagttgtcctgctttttgaaacaggattgtcctgtcattagcctgttttttgaaaaatccgtcataaccacaatagaaggagcgaagcacctgccgatcacggcgggtgcttcgtgctttccagactattatgaacggagatttttctatgacaatctatgaaaccatcaaggcggcgatcagcgtaaagcaagccgccgaacattacgggctgaaagcgagccgcaacggcatggcttgctgcccgttccacaacgacaggtatccgagcttgaagctgaacgaggaatattttttctgctttggctgcggagccaagggggatgtgatcgacctcgtggcgagattgttcgatctgagcaactatgaagcggcacaaaggctggctgcggactttgggcttgacccgaaaccgcctaatgccgcagctatggtcaagccgaaacatccccgtatccgtcagttccgggaggatgaaatgctgtgcttccgggtgctgacggactatctgcatctgctggaagattggaaagtgcggtatgcaccgaaaataccggacgatgctctggatgaccgttttgtggaagcctgccagatgattgattatatcgaatatctggcagatgtgctgacggtgggtgatctggaagaacgtgttgccgtggtggacgagctgatgaaggagggcaagattgctttccttggggactatgtggcacggaaacgaaaggagggggcgtcccgtggggaagaaaggtaaaacaccggatatgaatctgccaatctggtttgatgggcagaacatcaacgaagctctgttttgtgaagaatttctgcaagagcgcaggatcatctttgcgaacggagcttttttcacgcccgatggtcgggtgacagacgatctccttctgcgtggggagatttacgacaagctgaaattctgtgccgtgaacaacatcccccggaagatcaccaacattctggaagtgctgaaactggaagcgcaagtgcctgacttcccaccggagcaggatcggattcatttgtccaacggtacgctactgctgaacggcacatttaccgagggcagaccgactatcgtgcgaaaccgtctgcctgttgtttacaatcctcatgcacctacacctgtgacctggctaaaatttctggatgggctgctccatgcggaggacatccccactttgcaggagtttatcggctactgtctgattccttccaacaaggggcagcgcatgatggtgattaaaggtaacggcggcgagggcaaatcccaaatcggtgcggtgctgtccgctatattcggcacgaatatgaaagacggcagcatcggaaaaatttccgaaaaccgcttcgcccgtgctgatctggagcacatcctgctgtgcgtggatgatgatatgcggatggaagctctgcgccagaccaactatgtaaaatccatcgtgactgcacagggcaaaatggacttggaacgcaagggcaagcagagttatcagggctggatgtttgctcggctgcttgcattcagcaacggcgatctgcaagctttgtatgaccgcagcgacggtttttaccgcagacaacttgtgctgaccaccaaagaaaagcccgtgggcagagccgacgatcccgaccttgctgagaagatgaaagctgaagctgagggcatcttcctgtgggcgttcgaaggattgcagcggctcgttgccaacaactttaagttttcggagagtgaccgcatccgtgaaaatcgggaagcggtcaagcgtgacaacaacaatatctttgatttcatggaatcagagggatatatccggcgcaaagcggatgcgtccatcagctccaaggatttctatgaaatctatcggatgtggtgcgaggaaaattctcttgctacgctgaaagcccgcagcttcagcgacgccatgattgccaatgccaagaaattcaatctggagcattgcaacaacatcaccaactcagccggacggcgggtgtggggattcatgggagtggaagccattgcacgacctcatataaatgggttttacggagattcgccgtgtacgtacgtaccggaggacattccggaggaatggcggcaggtcgagtaaatcccattgctggtatgtatgtacgcagcaaaagagcgtaaaacgcttgttatagaaacagcacacatcctctcgttcgggctgtttctatgtccacaggcttttgaaaaagtgtctgtggacaccggctgcaagaggaagttgacacagaacagcttcatgcagacgggctggccatgggaaaaggcgcagatattttctccttggtcagcagaggtcaccgcagtgaccgcataccctctccggaggagccctcggagagcccacggcactttgcagccagtatggatgaaagtgtaatagtgggttattacactttgaaaaagtgcctctccgtagctctccgttgtctgcaaactccaaagaaaggacaaaaaatccatggcaagaaatgatggaatagaccgtaccgtagccagaaatcaggacttggaaacgcctgcggatgtggcgaaggtacaggaacacaatgagcgtgaaaaggacagctacagcaatcaggacatcgtgccagaacgcacttctctgaacgtccatttcaaagcacccacggacgattatgtaaaaatgtttgagcagatggaacaagacggcaataccaaaggattttttaacgggcttacagggcagaaaaaccccgaaaatgataccgagatgatacagaattaccgccgataccgccacaccagcggaaacggcagaaaggagcgcacccatgccaagaatgagcaagaaacggcggctggaatggtcttttttcctgcgacaagtgaaagccgggaataccacctgcgaccgtatcacatacaacgacctctgccggggctgtacccatagctgcaagcagagcttccgggcggttatcatactctgcccccgctactactccaaacgccggaaaaaggaggacagggacaatggcagataaccgcaagtattactacctcaagctgaaagagaacttttttgacagcgactccattgtgctgctggaagatatgaaagacggtgataagtaatattataagaaacacacttgaggatttcatgtggaaatgcaactgggaattcgttggagaaaaatgtgagcatttcttccgacggaatgtttgcatctgattccgtgtctcttccacgtttggacaatccgacggggcatgtccgacacaccggagacaatgggcggactttctggcagcactaactgcactccctcgtagacatgataaaaccgcgcgaatccgactttacccagcctgcaaatgtataacccggtcttaccggatctggaattgattttgttgtcccgtaatctccagaaaagctctgcacatcagcactcccattccaggttccgccgtttggatcaaccctcaaagtcgaatgattgatttccgcacttgctgtcatagatacatcctgtcccggcatcgaaaaagtatatcttttcgttcgcaagccagcagacaattttaggacttttgtgtgtgtcccttgcggcaccagacaacagatggcataaatgccatctttatgtcgaacaaaacataaccgcgcgaagccgatgtttgaattgccatctgccatatttttaatagcagatggcaacgagtttcggttcgcgcggttttatattgtctgtgaagaggtgccattagggacaccagaaagtccgctcattgtctacttaaacgtttgtctttacttacgcttaactgataatccttaaaaatatctgaacgcttagttgtatcaccatttgaaagaccattttcctgaataaattccttcttcacattatcaaacatcttttgacgatattcctcagatacacttgtgagttgctgccacgatgtacctttgctggtaacatccattcctgctactccatttgcattcagcaaatcaccttctgaatcaaattgcttcatcagattcttaataatggtatctcttccaccgaatgtttcatatatcattctttcttctggtgacatcatggcttcattttgcataataccagataaccagcctttttctttcaaagccttatattgtttgctatttgtattgatgccattatacgtgttacctaatccgctgatattcattgccatataaaaacctccttgtaaataaattcaaaatccgtttagaattaactcaatgttatatggtatatatcgtcataaatctccaagaaataaatttcaccgttaagtgccctcacaattatacaggtaactcacaatcctttagccaaaatcgcagttccataacagtcacagcaattttatattttacttcgatttcaactttttctggcggattggctaaaagcctgtcaatatcctgttcctcaacatcagccatttttgctatcgttagcttggatatgccatgataggaaacaagcacttccaaaaaaccgcttaattgcttatccttatcttcaatcgctccaaaatacagaaatcctacttctatttaaaattctgaattatgaactcaattccgttaccagtgaagaatatctttttgtccggttctttatatcctcctccaatctcatttattgagaatcgtctttttaccgtgcatatatattcaatatctttttatctattataatgaaatcaagggctggtctaatgccagccctacaaaaatgaaaattcacatagaaaataaatttacaatttttccgatataaacctgttatcaacaaatacaaacataatttatattatcgtatctattgatatgatatgtatttcaaagagttaccagaagtttttgaaaacttttcccttgtgatattatctaaagctcctaattttatacttttcccatgatggagcagcttatttgaccgtatctctagcaccaaagatgttgtattctatactgatacatcaatagaattgcgaactaacctattaccatttttgacaagcgtagattccactgattctcttgtaacgttatcaagaatgcttgtatcaaacttttgtcccggcttccaatttggattagccgatttcactgctgcatacatagcagctctatactgtccttcgtattgctctaaagtccatgtaccacttaaacgtttgtctttacttacgcttaactgataatccttaaaaatatctgaacgcttagttgtatcaccatttgaaagcgaggaagcacgaatgaatgggatggatctggatgatatgatgatggagttgccgccggtgatggatgaaaattatatgaaggatgcagatgacatcctggaaaagggcgccagagcgttgcggctttatgaatcatcatctgattatcaatatatcaaggatcagctgcagatgcttgttgatccggaagatgaagcggtgataaaaagacttaaagcagggactgcttttgtgtggcggttaaagtatgctttgcgtgatcggaatttggtgttggtaaagcaatttatagatattgatgctcgtatgtcacagttgcaaagaagccggatattgcttgagatgagagtgtctcataagtcgccgtttgagtaagaacgtattaacaataataatagttgcgtaaccgtgcagaagcgtcgtggtatctgaatgctgcagatcttgtgccggttggaacggtgccgggtggatccggaaacggagctggagcgggaaagccgcaggacaagcagccggaaaagaaggcataagtaaatgaatctgttttggcgctggggacggcgcgtgaaaaagtgggatgacagactggtggctcggtctgtcatctttttgctagtcacatcgacggtaattggaatttggcttgtgtggagacagaatctgtttatagatgcgccggtgatcagcaagatagcaacggtgtgcctgtttgatgtgatgctgttggtcgttgtatatggggttatgcgccgtcaacgttggtactgggaggatttgtgtaatcggcaggaacttgcccggatgctcattgacaatatgtggtatggatctgatgcgcgatctaacggcagaggtgaccaggatttgattacatatgtgccgcatttgtacttctggcgtcggtatagtatcacggacttcccgcggctttattataagcggaaaaagggtcggatctatattacggtcaagataacaatgggaaagtaccaggatagcctgttgaagcttgatagtaaggtagagactggattggactgtgagctgatagcgtcaagctataagcacaagtggcagcattatacgtttttgtgtgatgtgcaatcaagccggatccaattaacggaaatgaaatgctatgacggaaagatgccgctgatgcgtcatctgaaatgggcttatgaggagcatccgcatgcgttgattgtaggcgagacgggatccggaaaaacttatgcattgatgagctttatcgaggcggtcgctaaatccggcgccgatctggtcgtgatcgatgcaaaaaatgcagatctttccggtttggcggggtatcttccggaagtatatttcggatccgctgatattaaagagcaggttataaagttttatgaagacatgctcggtcgaatggagagtatgaagcgttgtgccgattatgagccagggcggaattatcgcgtttttggctttcaggcgcgttttatgatctttgacgagtacgtggcgtatttgtcgatgctgcaaaaaaaagaagccgaggaagtgatcagttatctgcaaaagattgtcctgcttggacgccaggcgggatttttcgtgatcttgtcctgccagcgtccggatgctaagtatctgccggatggtgtccgggatcagttcggactccggatagctcttggtgcgatgacggatagcggctatactatgatgtttggcacgacagaaaagcggtttataacaaaagacatcaaaggacgtggctatgtaggactttgggatggcgttattacagaattttacgcgccatatgtgccgccggatcatcatttcagagagagtatcggcgctgcttacgccggggcgcacgcgggcggaacgtccggcaagcttttcccggcgagcgcggagagcgtcgcaagccctgccccgcgcgcggtcggagacaaagcgcagcgagggcagggcgaagcgtaagctggggagcggagagcagggaaaaagcgggagacggcgcagccgtctcccgcgtgacccccggcatgtaacacgggggtacactttcccattgaaaagtgacattttgccagtatacataagggtttgccgttatttgaaaaagttcgacatatggaaaaaagtcgaacttttaaagatgtttttttttgagaaagggaaaatgcattttgtagagcctgacaagcaaggaaatggcttatacgtcaatcgaaactgtgggtatgtgggtatctatgcgttttatgaaggcagaaagaacgggtggaaaacgggtgggtaagcggtggaaaagatgcagttccttttccacgacttatccatgcgttatccatacgttcttttgtcttcgggcatagatatccatatatccacggtttgtaaaaataaaacagcaggaggatgcggaaatggaattgtcaggtgctacgattcgagaaaggaggaaagaggatcatatgacccagaaagaattggccgcattattaggaattacgccaacgtaccttgcagagattgaaacaggaaggcgtaaggcatctgataaattactggaaaaaataaacttttttttgaaattgtatcgaccagatgcgggattggagatattgctggattattgccggatacgttttttgagcactgacataaagcatatcttggaggatgtcttaggcattcggcttaaatatatgattcgcgagaaccatgcgctatacggttacagtgcacagtatcttatgggagatattgttgtgatgcattccgaggatgagaagctggggtgtcttctggagctaaagggtaaggggtgccgtcagtttgaaatttttttgaatgcgcaaggacgtacctggtttgatttttttcgccaggttgaggtaaagcgtggtgtgtataagcggattgatattgctatcaatgatagggcaggatggcttgacattccgtatcttgcggagaagtgccggaaagaagagtatagtacgattttccgggcatatcggaattatcagagcggtgaacttatacgtgcaagagaagatgacagggatcagatggggaatacgctctatcttggtagcatgaagagcgagatatatttttgcatctacgaaaaagattatgaacagtatgtaaaaactggacaagagattgaggatgcagatataaagaaccgttttgagatccggcttaaggatgatcgtgctactcatgcagttgaggatctgcttgattatgaagatcctgcaaaaacagcatttggaattattaaccgttatgtgacttttctgacgccaaaagccggagaggaggatataacaaaatgggacatcgatcctatgtgggcgcggtttatcggagaagaggaccgccagttgaagctgacagatgcaccggagccgtacactttagagcggacgcttaactggatcagacgtcaggtggcgccatcttttaagatgctgcatcagctcgcggagattcggggagaagttgacctgcttgatcggatgattgatgaggcaaagttatctccgcagcataaaaagctgttgaaacaacagcaaacagaagtaaaagagatgcttgcagaacggtttgctgatatggggatccgggttgatccggatactggagaaattatggaagcgtagaaaatgatttgttgcgatgtcgcaacaggaaggaagtgtgaatatgtatttcggtcagaatgcttttaaccttgtgatggcaaatattcagccgcttgtattgcttggaattgcaattattggccttgtgctgttggtacagcataaggcggctggagtagtaatgctcattgtagcagcaatttttgctgtaggtcttgtgtttaatccaaacggtgcaaaggatgctatgctgtcagtttttaatacggtaattggcggcgggacgataactggtattgtgccgcattttttgattttgtaaatgatgttgtagcggattttcattatatcacgagtccccagtgttctacactggggagaaaggagaaaaatgcgaaaaataaaaagttattcgagtgtttggaaatttgaaaagtatttatcttctgttggagatcttccgttaccacttcctgtgacctttgtacagatagcatggttcgcgggtacgttttttgcaatattatttgtctttgggaaaatgccgccgttgtcatattgcaataacgtattatttgagtatggagtgattccagggggaattgcctggtttatgtcaaaaaannnnnnnnnnaccgtacagttggttgaaatcatttttcctgtatcttttgcggcctaagcagacgtatgcaggcaaaagagtaaaatatgggaaaagtaagattgaagatgaaataacgattgtgaggtgttataagtatgttccagataccgattaagtacatcgaaaataatttggttttgaataatgataaggaatgttttgcttattatgaaatgattccttacaattattcgtttctttcggcggatcagaagaatcagatccatgatgagtttcggcagcttgtggcagcgaacaaaaacggccggatgcattttctgatgattgcagcggagacaagtatcagagagcggcaggagcgttccaaacagtgtgttggagagcataaggaagcagctgaatattttattgaccgtcagacagagatactggtagcggatacgttggctgatgaggctgtggatgatgatgtagaaaaaagtgagatgcaaaatgatgatcggaacggtagtcagattgattatcgtttttttattggcattaagcttgtgactcgggatgaggaactgacggtaacacgtgtgaaagaactggttcgtgatgcggtgattgattttgtgaaaagtgtgaatcatgagttggcaggagatttttacagcgtaagtaactcggagatgagccgttatgcaagaatggaaaagcagctgatgaagcggatcagtcgccggtttcgttttcgccggatggaagagaaagattttggctatctgatggagcatttgtacggacaaacacgggtgccttattatcaatatcattacaggcttccaaaagagcggatgaaggaagaaaccttggttaaaaagtatgatctgcttaagttatccagatgcttgcaggaagaacatcagcgatatgtcaagttggagagacaaaaagaaacggtgtacgcagcttatctttcgattgatacgattgttggagagattgcttttccttcgtcggaaatactttactatagccaggaggcattgagctttccggtggatgtgagcgtaaatgtggagattgcaccgaataaaaaagctttaacaactgtccggaacaaaaagaaagagatgcaggatcttgatgaccatgcttttgagaatagtcaggatacggataacacggttatagaaggattgcaggcagcggtggaacttgagaatgaattgactgtatctaaagatgcgatgtataaagtatcgtatgttctccgggtgtcagcgtctagcgttgacgtgctggaagaccgggtggatgagctgatggaattgtacagtgatagcaatataaacgggtgtcagcgtctagcgttgacgtgctggaagaccgggtggatgagctgatggaattgtacagtgatagcaatataaagttggcgcgtccatttggggatatgttaggacttgctggggagtttataccgaccagcaagcgatatttggatgattatgtgcaatacgtgacggctgatttttttgctgcacttgggttcggtgcggcgcagatcattggagaggagtttggagagtatatcggtatcaatacagcgacgggacggcatgtttatattcgaccggaattggctgcacagggagtaaaaggatcagttacgaatgcacttactaaggcatttttgggaagccttggtggtggtaaatcgatgtcggtgaatttgcttgccacgcttgctactgtatacggtgcgaaaactttgtttattgaccctaagtcggagcgcggacagtggaaagaaaagctggaaccgttggggttggatatcaacatagttgagcttgaaaatgatgaggacaatcggggaatgcttgatccatttgtgattttgcggcgtgcaaaggatgcggaaagtcttgctatggatttgttgacgtatttaaccggagtgtcaattagtgatagagagcgattcccggagctgcgggaagctgtacgtcgggttgggaagcgggagcagcgtggaatgttgtgcgtgatcgatgaactgcataatgccgggaatccggtggcggaaaatctggcacggcatatagagggctttgcagattatgatttcgcagcgttacttttttctgatggatctgttcctggatcgattggatatgatggggatatgaatattatccaggtgaaggatttgacgcttccagataaggagaagtctccagatgaatattcgtcgatagagcgtttgtcaatagcggctatgatcgttataagcaattttgcgttagattttatctattcagacaggagcgtgtttaaggatgtggtgttggatgaggcttggagtttacttgccgtagcgcagggaaaagctcttgtaaataagctggtgcgtgctggtcgagccatgaatgcgggcgttgatattgtaacgcaaaatgcggatgacgttggtgatgaaaaaatgaaaaataatattggactgaaatttgctttccggtcaacagatattgttgagattaagaagatccttacgtttttcggacttgatccggaggatgaagataatcagaaaaagattaaaggactggagaatggagagtgtcttttccaggatctttatggcaggacagcggtgatttatattgatccggtgtttaactggctgtttgacgcgtttgatactcgccctccgcagcgggttgaggaagaggtgatcttagatgaagcagatgttgagtaagaaaaaatggcttgttgttacgtttttgatcgtattgtcgtatttttttgtgccggtaactgcaaaggcaagtgggcttgttgagtttaaccagaattcgcagtatttatattctacatatgatttggggaattatgatcttgacttttatgtagacagttcatggagctggttgccgtggaattggatggatgcgattgggcgtcaggtaatgtatggtttgtactgtttgactaatacgatatggtatttaagtcgtttgattagttcagcgacaggagctgttgtagcggaagcgtataggtttgatctaatcaatgaggtggcggatagcatcgggtcaaatatgcagcatttggcaggagtgagtacgtcggggatttcaagtgacgggttttacgctggatttttaccctgggtggttttggtacttggagtatatgttacatataagggattgtttaaacggcagtttacagcagcgctgggtgctgccgtgaagacagtagttatctttcttttttcggcggcacttatagtatatgctccgacgtgcataagggacgtgaacgaattttcaacggatatcagtacggcggcacttaatcttggaatgggtgttgtgatgcctggggctgaacatggcgatggggatagtgtggatctgatccgcgataaccttttttccatacaggtttatcagccgtggttgttgatggagtggggtacgacagatacgggggctattgggtcagatcgggtaagcgcggtacttacggtgtcgccggatggaaactacggaacggatcgggaaacggctgtaaaaaatgaggttgagacatacggcaatatgcgaatgtcagtgcttaaggtggtggcgcgttttggtgaagttatttttatttttatcatcaatttagtaataagtgcatttgtaatgttactgtccgggatgctggtacttacacagattttatttatagtgtacgtgatgtttttaagcgtttcctttgttttggcaatgtttccggggtgtgaaagtctgttgcgaaaatctttgattaaggtctttaacatgttaatgcttagagttggctatacgctgttgataacggttgcatttacgatatctacagtgatctatgggctatctggtggacatgcttttgtgacgattggctttttgcagattgtggtttttgtcgggatcttctttgcaaagagggatatccttggtatggtgtcggtgccggaagatggcggtactaggcgtgttggatcgttgcttggaggagctttgatatataggggattgcgtcagggatcgcggcgtttaaatcgtgcgttgcctttgccggtgaggactgcgggtggtacggtggaaaagatgacgcaaaaaccgcgcaaggtagtcagagacaaggtaagcattgcaaaagaaaggacagatggggcgattgaccggaaacttgacggattgaaagggacggataaagaaacggtggagcggaaacatcgggctgcagaagctgttcgtaggcatcaggaacgggattatacgatgtctgattatatgccgcgagaaataggagcaaagtttcatggacgatctgggactggtgataaggtgacgtcacttagtgtatatgatcgttatatggatcgtaggaagcagaagccgtatcggttatcacgtaatacgccgggagtaaaagaagctgattatacgagtggtacttggaaagtggcggcggataagcatgtgcgtccgaatctatgggcggatatgcctgataaggaaaaagctgataagaagtatcggcggcgccggtttgacaataaggcggcggatgtttttgcgtgggatgcaccgggggcagatcttaaagatgcatctcgtcctgtgtcaaggacacaagatcgtaggatgaagcatttttcatttgagaagagaacgggtgcagcattagataaaaataaggttgtacagggtgtgagagaacaacgcttgaaggcttcttctggagaacttgtgaaacgtgatacagaaaaagcggatgaaagcgtgatggttggcgagaaaaaggtattccgaagtatgaccggaacgcagcatgtccatccagaacgtcagaatgtcagtcagaaggaatatgtagaaaagaatgtgccgcaacagaaggaagatgccgatttacatagaagaaaaacacggaattataagaagtctgaatatcagacagagggtgtacatgagaagagaaagcggtgattgatttggaaaaattgaagaagatgaaaaatcttaaaatatcattgctcatgttacagttgatatggccgcttttgggtttgctgatgtcggcatcgttgcttattattacatctagtaaaagtaaaggaagtgttcaatttcaaaatggaatggcagtaaacgcagaagtgcaagcttatgcagccatcatagcgcagaaagcggaagaacatggaatatcagagtatgtgcagtatcttatggcgataatgatggtcgaatctggtggtgtagggaatgatcctatgcagtcgctaggtacgaccgatctttcggctgaacaacggataccggaaatgtcaatcgaatatggtgtggctatttttgcgtatttgctccagcggggtcaagaagctggagttgatattgatactatcatccaggcgtataattttggtgcgtcgtacattgattatgtagcggcgcgagggagagaacatgagctggcttttgctgcagactttgcatccgcacgatgcagtggacagaaggtaacgtatgataatgagatcgctgtccgggagaatggcggctggcgttataattacggaaatatgttttacacctatctggtgcggcagtatttggcgggggatcctttggcggcggatgcgtcaagtgcgattatcggcgaggcgcttaagtataagggatggacgtatgtatatggaggatcgaacccaaacacatcatttgattgctcggggctgacagcgtggtgttatggtacggtagggttggcattgccgcattctgcacaggggcagtatgatgcaatgcagcatattactttggaggaagcgatgcctggtgatctggtattttttacgcagacggtatctggcggaaattatattacacatgttggaatttatgtcggtgataataaaatgtttcatgccggtaatccgattggatatgcagatcttacggggcgatattggcggcagcattttgtatgaagaagtcaatgagctggcaagagcatccataggttacattgaatcagatgtgatggatataaagaaacgatatgtaacgttaggcttccacctgtatgaaatggatcagtgcagatactatgaagatctgggatatgaaaatttgtatgaatgtattgaagcaaattttgcaatggataaatcagcggtgtcgcggtgtattggtgtctggaaagcggactttctggtgtccctaatggcacctcttcacagacaatataaaaccgcgcgaaccgaaactcgccggcatctgctattgaaaataaggcagatgccgactcagacatcggcttcgcgcggttatgttttgttcagaggtgtccataagggacacacacaaaagtcctaaaattgtctgctggcttgcggacacagtccgtggagtgctccaaacttggaaagacaaaagaagtcgatgcggacatcgtgctcgcgacagacccggatgcagaccgtcttggcgtgtactgcaaggacacaaagaccggcggatatgtgacatttaccggaaatatgtccggtatgctgatcgcagagtacatcttaagagagaagacagcgatgggaaccatgcctggggctggctgtcggaaacggaggattttatgttaagacagaccaaccaacaaccaattaccgccctttacccaagactttcccatgaggacgagctgcaaggcgagagcaattccatttccaatcagaagcgtatccttgaaacctatgcaaagcagaacggcttttccaatctgcgctggtacacggacgacggttattctggtgcgaactttcaatgagttacatggagacttacaaagagtggtgcacaaacccgtattttgatgagaatacaaaggcagaacttgctgcaataggggacgatgcggcggagattgaggatcgtttttaccgtcagttagagtttggaaccggcggactgcgcggcgtgatcggagcgggaacgaaccgcatgaacatttataccgtgcgtcaggcgacacagggactggcgaactacattctctcccagaacggacaggagaagggtgttgcgatcgcccacgattccagaatcatgtccaccgaatttgcggatgaggcggcgctctgcctgaacgcaaacggcatcaaggcgtatgtgttcgacagcctgcgtccgacgccggagctttcctttgccgtgcgtgaactcggctgtatttccggaattgtgatcacggcgagccataacccgagagaatacaacggctacaaggtatactgggaggacggcgcacagatcacaccgccgcacgacaagaatatcctggcggaagtggcgaaggtgacatctttcgaccaggtgaagacgatgaagaaagaagatgccgttgccgcaggactttacaaggtcatcggaaaagagatcgacgatctcaatttatggagcagttcggaaaccttgatagcaatacaaaacactatccgatcaaaaagttgagtgaaatcgctgactattggaatggcttgacctataagccaactgatacagttcaggatggtacgggaatattggttttacgctcaagcaatattcaaaatggagcactatctttcgatgataatgtacgcgttacatgtccaattaaggaaaaattgttcgtaaaagagaatgatattctcttgtgttctcgaaatggaagtgccgcactggtagggaaaacggcactgataaaaggactgacggagccgatgacctttggtgcatttatgatgattatcagaagttcgtactatccatttttgaaaacctacttcgaaatgccagtgtttagaaaacagatttcaacaggtacctctacaatcaatcagattacaggaaaaatgctgaacgatataagtattcctgtacctgagttgaaagctgttgaacgttttaaactgctggtagaccagaccgataaatcaaaatttggtcctcctgcgcccacttgtaaatggtggctgcatggctgtggtactgcttcccggtggaagcgatatggcaggaaagccggtcaatataatactcccacttgtcgggcagctctgttttcagcccggaaagctctgtatcggtcagtatcacattgttgtatctgccataagcggcttcatcaaaatcttctgtatgaagttttcaaggtacaatagcgaacttcgttcgcattagaaattgcttcgcaatttccgtcaaacggaatgttttgcaatttcaatggagatggtgagattcgaactcatgaccccctgcttgcaaggcaggtgctctcccaactgagctacacccccattcatgcagttttctgcatgactaaatgggcttaagtggactcgaaccaccgacctcacgcttatcaggcgtgcgctctaaccggctgagctataagcccatttgaaatctggcagccacctgctttcccataccgtcgccagtatagtatcatcggccgcttaggtcttaaccatcgtgttcgggatgtggacgggtgtttcccctaagcgcatcgccaccagaaatttgtggctatcaatatttgattgttattgataactcaacagtgaacaaactctctacttgatttccttagaaaggaggtgatccagccgcaccttccgatacggctaccttgttaccgccaagaacagccattattatactgaattacatggaacgataatgccgatgcaatgttatacttgcccggaggaggggcaaggctttttttaactgatgtagatcatgtgagctttgaaaaagcaaacgagacacggcaaaataacctccaatcggctacgccatgtcatctttcctttcgcttacggggctttcaccctctctggcaggctttcccaaaacctttctgctaggattgacaaatcaattatgcggtccgaaccccggaatgcacgcattccggtttggcctctttccatttcgctcgccgctactttggaaccttgatttcattataatagataaaaagatattgaatatatatgcacggtaaaaagacgattctcaataaatgagattggtaaaaagtaaccttagtgctgttgaaaaaatcaccatagttctaatgaatcttctgcatctacccatatctgcattgttccatcaagatataattttgcatattcaagcggtttatcaatggcaagtgcgttcaatgcacagtctgatccgggtgtggttcggaaattgcgaagcaatttctaatgcgaacgaagttcgctattgtaccttgaaaacttcatacagaagattttgatgaaaatgattttttatcaagacatccgagaatatcgtaaacaaagtttacgaccaaaccaaacgaacgaaagttcaagatcgaagcaattcgatccgcgttattaaacgcaaagacccagtttctaacgctatagaaactgtaaacgaggtcaagcaaaaaagagcgcagggtggatgccttcttgtactataagcatgtagatacattatgtatgtatccgcatgcttatttttattataataaaaggcggataaggctagtgcggtgggacatagctcccgttttttagagtttattccgcctcttattataagcattcgtttaaacaggttggattaaatacatccgtgtaacgaacaagtctgaatggtaataagtctggcggagaaaaggaggatttgcatgaaacaaatagtaagtgtaggaatcgatgtatcaaaagggaaaagcactgtctgtgccatgatacatcctaatacgattattaaggaatcgtttgaagttttgcataccgtagaagaaatgtcaatgttagctgattacatcggatcacttgatggagaaattcgtattgtaatggaatcaacagggcattatcatcttccggttgcacaatttctgtatcaaaaaggcttttttgtatgtgttgaaaatgcatatattatacgacaattttcacgcattatgctgcatggcgcaaaaacagatccgcttgatgcaaaaaaattagcaaagtacggtttggcatactggagtgaactgaaaccatataaatttcatccaagctgctacacagaattaagtctattatccaagcagtatcagacatacataaagcttttgattgctgctaaacagaatgtaatacatttgatggatgagatgcttcctggtttcaaagaagcgctggatacagcaagcagtgttcaattctcaaaagtgaaatatgtggattttgccaaagaattctatcatgttgatatgataaaaagcatgggaaaagaaatttttcgagagaattataagcaatggtgtaaagaaaaaggataccgtttccaatcagaaaaggcagacgagctttttcacttggcggaagacggtatccctacactaccaacagagttcccttcaaccagactctgtatggaagtagcaacagagcaagtaagccaattaggttatgctctagaacaaatattatcacaaatgcaaaatcttgcaaagactttaccagaatatcaaacgatacgccaaatgggaggcatgggtgaaaagttatgtgtaaggtttatagctgacattggagacgttcgacgtttccataatggcaaagcattagttgcttatgcgggaattgatgctccgccttatcaatcaggacaatataccggcaccaaacgtagaataagcaaacgcggaaacagtgcattaaggaaaaccggttatgaggttatgaaaagtctgaaatcccatccgcccaaaacagatactcgtgtctatgattttataattaaaaaagagaatgaaggaaaaagtaagaaacaagccaaaatagccggtttaaataagtttttgcaaatctattatgcaagagtcgcttaatcaacacacctgtgctgtttccctcctcatcacgctcatacacctcacgacgcaatcccgaaaacttcaaatttccaaaagtctttacctcatcaacaacgattccctctttaagtctcatattcttttcctctcttcctgccgctccctgcggctttgcataattttaaatttattattgcaactctcttcgatcgccttaacctactgctttcctgcctgtgcaagctttgcagcctcttccggtgtcaccatatcatccgcggtcattttataatccgtgtacccgctaccctcaatatttctgccactcgccgaaagacgcgcattgataagcacaaccggctcatcatacccaaaatgtttttccccaaccgttgccggaagcgtcaccacaacatcatccgcacgctggcgagtagaaaaaagatgatagttgcgtcccgtaacacgtgtccgcccatttacatatgccgtttccgcatcacctacacctgcaaaagtcaactttccgaatgtttcctccattttcggagctacaaactttaattccatagccataattcttttcctctcttcctgccgctttctgcggctgtaactattattattgttaatacgttcttactcaaacggcgacttatgagacactctcatctcaagcaatatccggcttctttagccgtacttctcatacatatccagcattgcatcccacagggtcttgccgtgcttcttgcaccaggaagccacctcgcaaagcatcatgaccgccacgcacgcatccttgtctctcgcgtaggttcctgccaggcagccgtaactctcctccagtccgaatacgtagtgatacgtatgctgctgctcgaagaacttgatctgctctccgatatacttaaatccggtcagcacctcgatcaagacaatttgtaggacttttgtgtgtgtcccttattggcacctctgaacaaaacataaccgcgcgaagccgctgtctgaggcggcatctgccctattttcaatagcagatgccggcgagttcggttcgcgcggttttatattgtctgtgaagaggtgccatcgcggagtgctccaaacttggaaagacacggatcatcgaagatgcaaacatccggctggttagaaatgccacattttttggtccgaatttccacctgcatttccatctgaaatcccacggtgtgatcttataatattacttatcacacaaaagtgactatgcttattgtgacagttcctttaaaaaaagcctcatgcggtcttcccatggaagaaccgcgtgaggctttttcacatattcgctatcgcttagatcgctgtcacaactccgttttcgctgtcaagctctacataagcgctggactttaatacctccagtgcgttcttcgcgccgatcagtaccggaatatccaggctgagtcctgcaatcgctgcatggcagctgtcgctgtccgcctccacgatgagaccggatgcctgacgcatctgcttcatcatgcagttgttggtatctgcagcaacgatgatgtctccctctttgaagttcgcaagatcttcctcgctgtggcagacgcacaggtttgctgcaatcttcttacctgcaattccttttccttttaccaggatatgtcctgccacctgcaccttgatgaggttggtcgttccggatacgccaagcggtacgccggcagtcagaacaaccacatcgcccttgctgatcagacctgccgtctctgcagtgtcaaccgcatagtcaaacagttcttccgccttattcttctgctcaagaagcagcggtgcaacgccccaggaaagtccgagctgacggtatactttctccgtcaggcacgcgccgatgatcggagagtacgggcggtacttggagatcatgcgcgctgtgcgtccggacttggatactgccagaatcgccgccgcattgaggtctcccgccatcgtacaggttgcatgggaaatcgcgttcgtcacatccgggctgctcatattcttacggtccttgaaacgctgcagatagttgatatcgcactcggtgcgaaccgcaatgcggatcatcgtcttcaatgcctcgatcggatactggccggcagccgtctcaccggaaagcatgatcgcacttgttccgtcatagattgcgttggcaacgtctgtcgcctccgcgcgggtcggacgcggatgtttcatcatggaatccaacatctgggtcgccgtgataaccacttttccggcaccgctgactttcttgataatcatcttctgaatgacaggaacgtcctcaagcggaatctctacacccatgtcgccacgggcaaccatgataccgtcggagacgcggatgatctcatcgatgttctgcacaccctgcatgttctcgatcttcgcgatgatatgaatgtcctcgccgcctttttcctcaagaatcttgcggattgcaagcacgtcatccgcgcagcgcacgaaggatgccgcaatgaaatcatagtcgttctccaccgcaaatacgatgtcgccatagtctttctcgctgatgtacggcatggaaagctccacattcggaacattcacaccttttttattggaaaccataccgccgttcataacggtacagacaatatccatcgacattttgccctctgcgtctgcctttgcaccggatactttctggatcttcttgacttccagaccgatcagtccgtcatcgatcagaatggtatctcccggcttcacatcgtccggcagttccttgtatgtgatcgtcacacggctctcatcacccacgatgtcctccgtcgtcagagtaaatgtctgtccgttcttcagctccaccttgccgcttgcaaactctttcagacggatctccggtccctttgtatccagcagagccgcgacaggacgcttcatctctccgcgcagcttgcgaagcatcgtaagtcttccaaactgctcctcgtgtcctccatgtgaaaagttaaagcgcgccacattcatgccttcctcgatcaggctgcgcatcacattctcatcatccgtcgacggtcctaacgtacatacaatttttgtctttcttaacataatattcctctctttattattctgtcactttattttgtaatcatggtgcccatgcccggagttacctggcttccatccacgtgaagctttgtaatcaatacggagcggatcgccgaatcaccgataaagtcgatcgcagcctgaatcttcggctgcatatccccctcgccgaactgtccctgctccatatatttctttgcttccgccactgtcatggaactcagcgggcgctcattctctgtgccgtagtccaggcacacattgtctacgcttgtcagtatcacgagcatatctgcctccagaagttctgcgagctttccggctgccagatctttctcgatcaccgcacttgctccctttaaatgattgtcctgggaaagaaccgggataccgcctcctccacaggcaacaacgatctgatccgcatctgtcagcgcgcggatcgcatccacctccacaatatcgaccggcttcggcgctgccacgatacggcggtagccgtctgccaccttcgtcacatggttgccttttttctcctctgcctctgcctcttcctccgtcatcacacggccgatgatcttgctcggcttgtaaaatgcctcatcgtacgggtcaaccaccacctgtgtcaggatcgtggataccgtcttgtagatacctctgttcagaagctctgcacgaatcgcattctgcagatcatatccgatatatccctggctcatcgccgagcagacagacatcggcgtcgccgtatattccggatacagacggcagaactcattcatcgccgtgtgaatcatgccgacctgcgggccgttgctgtgcgtgatgaccacctgatagtcctcgcggataaaatcagcgaccgcttttgccgtgcgcttcgtagcttccttctgctccggcagtgtcgttcccagtgcgtcatgtcccagtgcgataacgatcttctttttcttcatttttatcatcctccaacgcttttatgcgcgcatttgtaatcccttttccctgtatacaccaaaaaattttaccaattttattttatcacgaaccctctgtcatgcgcaatggtcaacttgtcacggaagtgctaaagtttgccgtgtcagaacgcaaaaagcgggaaccgcacacacgtttttcttttgtatgtgcaatccccaccctgtgttttatagtctcccatttttccggccggaatttaccggcttcgtcttgcccaaacttctgcccggctcctactcgtcctgcggcaggacaagcgaatcgatcagttcccagatctcctctcttccctgcttggtctccgctgaaaacggtatgatcgtcgttccgggctgcacgccgagtccctcacggattgccttgacatttttctgaatctggcttcgcttgatcttgtccagcttcgtcgcaatgatgatcggggcaaatccctgatacaccatccactcatacatcatccggtcgttggcagacggatcatgccggatatcaatcaagagaaaaacagccttcagacgtttggaggtgtgaagatagttctcgatcattttcccccactttgccttcacttcctcggacgccttggcatagccataacccggaagatccaccagatacatggcgtcattgatgttgtagaaattgatcgtctgcgtcttgcccggctgtgcggaggtacgcgccagcgctttccggttcatcagcgcattgatcagcgatgattttccgacgttcgactttcccgcaaatgccacttcattgtaagccgtatccggtatcttgctcgtaattccgcagacaatttcaagatttacatttttgatgaccatgttctactccttcttttcgcaaaaagcgacgcgaagcacctgctccatcgtctctacatagacgatttccagtccctttttgatctcacctgatatttcctcgacatccttctcattcttcttcggcacacagaccgtacggactccggcgtttttggccgcaagcagcttctccttcaatccgccgatcggcagcaccctgcctcggagcgtaatctctcccgtcattgcaacatccgcccgcaccggtgtcccggtaatcgccgagagcattgccgtcgccatcgtaatgccggcagacggtccgtccttgggaactgcaccttctgggatatggatgtgaatatcatttttctggaaaaactccgccggaatgtcatactgtccgccgaccgaccggatatagctgattcctgtctgtgccgactccttcatgacatcgcccagctgacctgtcagctggaactcacccttgccgggcatcacgttaacctcgatttccagcgtatctccgcccacactcgtccatgcaagtccgcgtacgattccgacctcatcggtctcgccgcgcatatcctggctgtatttttccttgccgagatacttcttgagattacgcaccgtcacatcaaccgtactgctttttccctcgtagatctcgcgcgccgccttgcgcgcaatctccccgatcctgcgctccaacccgcggactcccgcctctctggtataaccgcttatgatcttcgcaagggctccgtcgctgactttgaactgatcttcctttaagccgttgcgctccgtctgctttgccagcagatgttctctcgcaatgtgaagcttttcgttctccgtgtagctagttacctcaatgagctccatacgatccaatagcggtctcggaatcccctgcatggagttcgccgtcgcaataaaaagcacctccgaaaggtcaatcgggagctccacatagtgatcccggaacttgtgattctgttccgaatccagcacctcaagcagcgccgaggcagtgtcgcccttatagtcactgctcatcttgtcaatctcgtccagaagcatcagcgggttcttcacaccggcgctgcgcagaccgttcacgaggcgtcccggcatagctccgacgtatgttttccggtgtccccggatctccgcctcatcgcgcacaccgccaaggcagatccgcacgtatttcttatccagcgcacgcgccacggagcgcgcgatacttgtcttgccggttcccggcggccccaccagacagatgatcgggctttctcccttgctcgtcagattgcgcaccgcgagaaactccaacatacgctccttgactttctccagaccgtagtgatcttcctccagaatccgctctgcgtttgcaaggtctttgttgtcctcggacgctttattccacggaagctccagcagcgtctcgatataaccgcgggtcaccgcgctctccgatgaattcgcgctgatgctcttgaagcggtcaatctccttcttgatgcggtttttcacttcctggtcggcatccagcgcatccagtgctttctggtactcgtccgcatccgattccgtattgtcctcgccgagttcctcccggatgagcttcatctgctcgcgcagtatgtattccttctggttcttatccacgcgctctttgactttgctctggaattcattctggatggcagtgatttcaatctcttttaaaaggagcgccatcaatacctcatagcgctccgtaagtgtcattgcctccagaatcttctgcttttcttcgtaagaaaccggcagattgttcgcaacctgatccatcagcttcggcagatcctgtatggtaccgatctggcgcagcaattcttttccggcacgcggatttactgtctgataccggctgtatgtctcctgcacgctgcgcaccatcgcagctttggcctcttccgaaagcccctcctccggcagcacgcacggcgccacctctgccagaagatacggatccgtctgtgcaaaagccgaaaattctgcacgctcgataccctcaaccagaattcttacgatattgttttgtaatttgattacctgctttacttccgcgatcacaccgatatggtatacatcgtccgctcccggttcttcctgctcgacatccttctgcgccgacaggaaaatcttctgggaatccatcatgcactgttcgatcgcacggatggaccggtcacggctgatgtcaaaatgcgcgatcattcccggaagaatgaccatcccgcgaagcgcaaccgcaggtatttttaagatttctgtatccaacatatcctctatttttcttctatggtctttaatttctgctcctcaatggaaagcttctcctccaccagatccttggtgatctcacactcggtgatgctctcatccgacggaatatggtacatcagatccagcgtcacagcctccataatcgcgcgcagtcctctcgctcccgtcttgcgctcgagcgccttgtcagcgatcgcctccagtgcgtccgcgtcaaatgcaagcttcacgccatccagctcaaacagcttctcgtactgtctggtcagcgcattcttcggctcttttaagatgcggatcaaggcgtcgcggtctaacatatccaaagataccgtcaccggcacacggcctatgaactctgggatcagaccgaacttcacaaaatcctgcggcagcgcatgcttcaacacatcgccgatattgtactcattctttgacttgatgtccgcgttgaaaccgattgccttctgatccatacgcgtctcaatgatcttctcaagtccgtcaaatgctcctccgcagatgaacagaatgttcgtcgtatcgatctggatcagttcctgctgcggatgctttctgcctccctgcggcggtaccgatgcaatcgttccctcaaggatcttaagcagcgcctgctgtacaccctcgccggatacatctctcgtgatagacacgttctcggacttcttggagatcttatcgatctcatcgatatagatgataccgtgctgtgcacgctcaatgttgtaatctgccgcctgaataatcttcaagaggatattctctacatcctcaccgacataacctgcctctgtcaacgttgtggcatctgcaatcgcaaacggcacatttaagacacgcgccagcgtctgcgccagcagcgtcttaccggaaccggtcgggccaagcatcaggatgttgctcttctgcagttccacgcccagatcgtcccctgccataattctcttgtaatggttatatactgcaacggaaagaacctttttcgcctgatcctgtccgatcacataatcgtccagaaacgcttttaattcttccggttttaaaaggttgatctgctccgtctcttctgcggtgccggtctcttcctcgttctcaaactcttcctcaataatctctgcacagatgtccacacactcatcacagatatatgcccctttcggtcctgcgatcagcttgcgcacctgtccctgagactttccgcaaaaggagcagcggatctcatcgtcacttcttcctgccatttttaactattctccatgttctatcttacttcctgccaaaatcaggtcttatttgctttcttccttcttggtgtccttgcggatgatgacatcgtcgatcagtccgtacgcctttgcctcctcggcagacatgtagtaatcgcgctcggtatcggcagcaaccacatcgtacggcttgccggtgttggcagcgagaatctcatttaactttttcttggtctttaaaatgttctccgctgcgatctggatctctgtcgcctgtcctttggctccgccggacggctgatggatcatgacctccgcattcggaagcgcatagcgcttgccctttgttcctcccgcgagcaggaatgcacccatgcttgctgcaagtccgatgcagatggtggacacatcacacttgatgtactgcattgtatcgtaaatcgccatacccgctgtcaccataccgcccggggagttgatgtaaagctggatgtccttgttcggatcttcggactccaaaaacagaagctgtgccacaacaaggcttgccgttgtctcattgacttcctctccaaggaaaataatacgatcttttaacaggcgggaataaatatcataattgcgttctccgcggctggtctgctctacgacgtaaggtactaaactcatattcgatcctccattttatacttttttaataattacttataagcttaaacagaccggcccaatagagccagtctgtctgttttgcaataagaactgacaggggaattactcctctgttccctctttctcttctgcttctttttctttcttggattttgctttcgctctctccttcacgttctccatgatcaggtctactgccttggtcactgcaaggtctctcttcatggattccttctcgttgtcgccgatgtactctttgagcttgtcagcttccataccgtactgtgttgccatcttctcaatctcagcatcaagctcttcatcggtaatctcaatcttctcatcctttgcaatctgctctaataccaggctgctcttgatgcgtgtctcagcttccgggcgaacctgctcttttaacttgtcgagtgtcagaccggagaactgcatgtactgctccatggaaagaccgctctgtgccagtctctgagcaaattcattgaccatgttctcacactgtgtctcgatcattgcctccggaatctccatggtggacttgtcaatgatcttctggattgcctcgtcctccttggtcttcttagcctcgttctccttctctacctcaaggtgcttcttaacgtcagccttgtactcctctaaggtatcgaactcggatacatcctgtgcgaactcatcgttcagttccggaagttccttgcactttacttcgtggatcttaaccttgaacattgcaggctttccggcaagatctgctgcctgatacttctcagggaaggttacgtttacttctacttcgtcgccggcattcttgcctacgagctgatcctcgaacgtatcgatgaaggaatgggaaccgatctcaagcggatgattctcacccttgccgccctcaaatgcaacgccatcaacaaatccctcgaagtcgatcactgcggtatcgccgtttgcgatcggtctgtctgtaacggtaacagttcttgcgttgttatttctctctttctctactgctgcctctacctcttcgtcagatacggaggtatcgatcttggttacctgaacaccaagatacttgccaagctttacttccggtcttacagcaacctctgctgtgaagatgaaaggcttgccggactcgatctgtaccacgtcgatggtcggtctggatacgatgtcaataccgctctcctctactgctgcaggatagttctcctggatcagggtgtttgctgcgtcctcatagaacactgcctcgccgtacatcttctcgatcatctttctcggaactttacctttacggaaaccaggcatgctgatcttgcctttttctttcaggtaagcagcctggattgctttctctacttcttcggcagccacttcaatggtaagctttgccatattcttttctaagttttctacctgtacactcattgtaactatcttcctccttaatatatatgaaatatcatgtacatcttccgtccatcgcatgacattcgtcacgccagtcgcctgcagcccttttttaagggttcctgcctgtctttcggaaaaaagggcgtactacgactatcacagtcatttaaggattataacatacaagaccggaaaatactagcttttttttgatttctttgcggtttttccgccaaaaacacgccctagagctccacaccgcggtgttctacagatgtagagaacacaatcagcgtctttgtccgtccaaaatactgcaattccccgataaaacggtcgagttccatcgtattttcaaacaaaacctccagcagcatggaatagtcgccggtcacacagttacactcaatcacgtttttgcacttttttatatagcgaatgatggcggttctgtcaagccgcatccgcttttcgctgcgcggctttcttactctctcacccggcttcgtactgcttttttctcacggttttttttcacggtacacccttccgcccctctcattcggctttgtactgcttttttctcacggggttctttttccgctccacgctccgcagctgcttcttccgcgcggtctcttcccgtcgcttcgcatgcgccgcctccgccagaagcttcttatagttaagcagccggcgttccggcagtcttccgtcccgcaccgcctcctgcaccgcacaccccgtctctttttcatgtctgcagtctctgaatctgcaatgctgcgccaattcctcaatatccgaaaatgtcgtatccatcccgcattttgcatcccctacgccaagtacgcgcattcccggtgtatctatgacacgggagccatccggcagaaggatcatctgccggtaagtcgtcgtatggcgtcctttggaatcatcctcccggatcgcgccggtatccataaccgtctccccacacagcgcattcacaaacgtggatttgccgacaccggatgatcccagcagcactaccgtttttcccgcacccagatagcgttgcacgtgttccatcccttcgcccgttaccgcacttaccgcacacactgcaactcccggcgcctgcctctccacaagatttacataatattccggttcctcgcagagatcttttttcgtcagtatgacagccggcgtcgccccgctctcccacgcggctgtcagataacggtccagccggttctggttaaaatcatgattcatcgacatgaccagaaacacatagtcaaagtttgccgccaccgcctggcgctccatgccgggcgtcggattttcccggtaaaacacgctcgttctgggaagcgtctcaaggatcaatgcatccccgcaccggtttgtctgaatacgcacacggtcacccactgtcggaaatgcctccccgcccttgtcctgataatacacaccggtctttaacctggcattaagctttgtatctgacgtttcctgttccacaagaatctcataacgttctctgtgtaccgctgtgatcagtgccgtcgctttcgtattttctgttttatttcctgtatgctccatccgttttcctctttcctctcaattttccattcactgtttctttccattcctacaatctccattctgtttttctccatttttacattcctcctttattaaaaagaatctcgcttgcgagattctccgcgcgcgagcggttcgcaaagcgatattttccttaccgcgagctgcgcatcctcgcggagcgttttttatttcataggaaagttccactttcacacatgaatgtatcacggtatttcctatgaaattaaaaagcattcctgccacattcctgcaccgcaatgcttctgccttcattctatttttgtgccggattgccgtttccagattgtaaaaagcaatcgacggcttgcaacacccatttttcaacaagcattgccggcttgcaacatccatttttcaacaagcattgccggcttccagtctccgggttttccaacataatcgcagatttataccaggcgcttcaccataaagtgatcgtccgcatagctgccgtcccgataccggacactgtgcggctgcgttccccagatctcaaacccgaggctctcgtacagtcggatggcaggtgtgtttgtgctcaccacttcaagttctgcctgctcatatccgcactgcttcgccaccgcaagcaccgtctttagcatttccctgccgattccgagcccgcagtatttctgatagagggcaatcgcaacactgcagcgatgcgcatagcgctcataattttccagagacagcagggaacagttgccgacatgttctccagcaacggttccgatcaacatcagttcccgcggttcttttacgattccttctataaaatgttcctcctgctccggtgtaagactgatctcatccggctcacgtatcagaaatggcgtctccccggcagtcactttcagataccggatcagatcatttgcatccgtcactgctgcactgcgcagaatacagcttcgcccgtcccgacaggtaatttctcttggttcataaatcataattgggtctcctccctgtgatctgtatcactccggcactttattttttccacattttcttccgtgatcgtcaaaaagtcgatctgcacggtatcgctgccgacgcaaatcccggcaaaaacaggtttctctgacacgatgcgtcatgatagtcccggcttttccgctttttgtgcatccaccggaatcggtttttcctcttttatgcatccaccggaacctacttttcctcttttgtgcatccaccggaacatgcttttccggtgtcagaccttacctggctgcgtttgcatgtattacgcatcctttagatcgattcctgcttcccgcagatttcttcgcagttccggcatatcctgatgataaacgcatccccgcattcccaggcgtatccccgcttcaatgtttgccggcgagtcgtccacaaaatagctttcctgcggctcaatcttcattttccggaagaaatccacatacgcttcgcgttccggcttcagatatccacactcacacgaaatccagatgccgtccatataccctacagacggaatattttttgaaaatgcccggaaacggtgtgatgtatttgacatcaaaaacaaatggtacccctgttccttcaactctcccaaaagcgcctccatcggcggattcggctcctgcttcatccgaaactccctcacgaaacgctccacaagctcccactcactctgcggaattctcttgcaaatggaacataccgcttcctcatcggtcattgttcctctgtccatgcaaatccactccaccgatgcacaaacctgatttttcaacaatactgcctgcgcttcatcctctgtatatgtcccgatgtaatcgctcagcttatattttgtcagaacatttcccatatcaaatacgatatttttcattttctctccatattccgttgacctgctgcgtcacattgttccggcgcatgcgcgtactcttatctttctatgtcgatccggcgcatgcgcgtacttttatctttctatgttgatctggcacatgcgcattgcgtcgagcgctgtctcgtggcttttcggcgttacccctgcacagcaggatgcatccacgataatcggtgtctccggcaaaaatgctttcaataacaatgcatttgagatcacacaaatgtccgtgcagagtccaaccagcgtaatgtcctcgatctgctcttttctattctcctcctgcagcaactcgccaagcttctccgaaccgaatgtcaccttatcaatcgcctccgcctcccggagcgcctctagctgcggacagatctcccagcctttcgtgcccttgatgcagtgcggcaccggaagatgttttccctcctgtgtctctaaataccgctctccatgtgtatcccgcgtgaaaatcacttttcccggaaactcgcggattttctgctccacccgtgggacaatggcgaccgcctccggtgttccaagcgctccatcgataaaatcattctgcatgtccaccacaatcaatattttctgcatcttttctcctccttctgaaacttcgcgggtctcacggcctctttttcctctctcagacccgcagggcacctctttttcacgaatttcttctgttttttcgctctccgcgggtctcacgagctcttttttctttcctagacccgcaggggaaacctttctaactcggctgcagaccaggtctactcgtccaactctaagagtcccgtcaccagcataatcccccttccagctcaactacctgccaagacgctcttcccagttcaactgcctaccaggttcacctctttatcgcagctactgaccaagtctacctttccagcccaaccgcacccgcagccgcaacgcctcatcttccaattttttattccagccccgcgaactgcgccatgtaaagatcgtaataagcaccttttttcttcatcagctctgccggacttccctgctctaagatgccgccctggtcgatgacaaaaatacggtctgcattctggatggtcgaaaggcggtgtgcaatcacgaaactggttctgccggacagcagcgcctcaattcccttctgcacaagaatctcggtatgtgtatcaatactggacgttgcctcatccagaatcagaatcttcggcatcgagatcatcgtccgcgcaaatgcaatcagctggcgctgtccgatcgaaagtcccgctccgtgctcctttaactccgtgtcataccctttttccatcttcataatgaactcgtgcgcattgacggccttcgccgcagcgatcatctcctcatccgtagcgtcaagctttccatataaaatattttcacgcacagtgccgtggaaaataaaattgtcctgtgtcatgacacccatctgccgccgcagactttcgatggaaatcttcgtgagatcgtagccatccaccgaaatgacaccatcctcaatgtcatagaatcgactgatcagattcacgatcgtcgtcttgcccgcgcctgtcggtccgacaagcgcaatcgtctctcccggctccaccacaaaactcacatcggaaagcacctttgtctccgccggcgttcccttatcgtatgtgaagctgacatgggaaaattccactcttccctgtacttccggcagttccgccacgtccgccgcatccacgatatctgcctttgtatccagaatatcaaaaattcgctccgccgccgttaagtttgtcaccagattattgtaaaaattactcagattcataatcgggttccagaacatattgatgtacgtgccgaatgcaaccagaagtccgaccgaaaccttttcaaaaccgagaaagcggacgccgaccagatagagcatcatcgcgccgattccccagcagaaatcaatcaccggtccgaacatatccgcatagcgcaccgcgtccacgaacgactgctgatgctcatcggtcagatttccgaaaatctctcttgtctcctcctcggcaccaaaactctgcaccacattcattcccgcaatgtcctcatgcacataggcattgaggttggatgattttttgcggaaaatctgccagcgcttatgcgaggcagtctgcacaaaccagatgccgccgatcatcagcggaatcgtgctgagtgatgcaagtgccagacgccagtcctttatcagcatgatcaccacaacgccgatgaccgtaatcagttccggaatcaatgttgtcaccacatttaccagcacatcccgcagcgaattcacatcaccgatgattctcgccagaatctttccggtcggtctgctgtcaaaaaaggaaaacgacagcgtctgaatgtgttcgtacagatcctgacggatgcgcagcagaatcttgttcgacaccaccgccatcacatacatacggatcttcaccataatgataaaaataatattcagtcccagcgcaaacagaccgagtcccatcagccccctcatatctttatttgcaatataatggtcgatcgcctcctcaatcagaagcggattgaccagtgaaatggcaaccgtcacagccatgcagagcagcacgccgatcaagattgctttataatccagtaagtaggagaacaaccttcggaaaatcttctttttgtcagtgttctccataaattcatcttcacgataggaattaactgccatgaactctcatccccttttcctctatataaacctttccatccctgccgttcgcctgccctcagcagcacgctgctggtgccggctctcctgcaggggcgcttacagaagttctcattcgctgcgcccgctcgggcggcttcgcctccctcgctgtacggcattcgccgcatccctgccgttcgcctgctctcagcagcacgctgctggtgccggctctcctgcagaggcgctgctcattgctaacgcaccatactgtgccatgtaggtgtcatagtacaaacctttctttgcgagaagctcctcgtgtgtcccgcgctccgcaatctttccgtctgcaagataaataatctcatccgcatgacgcaccgccgagatgcggtgtgcaatgataatctttgtcgtatcgcgcagagcgtttaacgtctgctggatctcatgctccgtctccatatcaagcgccgaggtcgagtcgtcaagcaccagaatcgggctgtgctttgccagcgcgcgcgcaatgctgatccgctgcttctgtccgcccgaaagtccgacaccgcgctccccgatgacagtctcgtactgttcatccatcttctcaatgaacccgcgcgctttggcatcctctgccgcgaggcgcaccgcctccatctgaagttccttgcgctgtcccatcttgatgttctcctcgatcgtatccgagaaaaggaacacatcctgcaaaacaaccgcgatgttgctgcggagctgatgcacatccatctttcgcacatccacaccgtcaatcttcaccgcgccgtccgtcacatcgtaaaaccgctggagcagattgacgatggaggatttgccggaaccggtcgcccccatgataccgagcgtctttcctgccggaacggtaacattgatgtcctgcagaatcttctgcccgtccatgacaaagcccgcgtggtcaaaacagatctctccccggatttcgtcaagcacctttggatgctcgtcgtttttgatcttcggctgctccacataaatcttgcggatcttcttataagatgccaccgcggacgacacatcgttcgtcagccagcccagcatctccatcggccaggtacagttcctgctgtactccacaaacgccaccagcgcacccagtgtcatctcaccgttcatgacaaaaataccgcccaggattgtggaacaaaccggaagcacctttcccacaaacgaaaacagcgggtaatactttgtcagtacctttgcctgtgaaacattcagttcgtaataccggttgttgtgggataaaaatttttcaatctcatgcttttcccttgcaaacgccttgactgtgcgcacacctgcaagattctcctccgccacggttgtcagcacggcattttcctcactgatgtcctcgtaaatcttgtcgagcttgcgctccatgatgatcgcgaccgtaccgcacaggatcattgtggcaagcggcacgaacgccagcttccagttgagcgaaaacatgcagtacagtaccatggacacatgaatgataacctcgatgacaagcatgcccacatagcccatcgcattccagattttatccacgtcatccttgacacgcgccatcagttctcccgtgttcgtgtcctcaaaatatcccatggacagcgactggatatggtcgaacagatccttgcgcattgccgatccgatcttggatgccagcacgtcgaacgtgaactccttgcagtagccgaaaatgctcctgccgattcccacgatcacgattccaaccagaagtttcgtcaaaagctccagttttccgcctatgatgacatcatccacaatctgctgtgtgatcttcggatacagcatatccagaacgatcgccgtcaccatcgaaaataccgcaaacagatacccataccaatagcgtccgatataggtgtataactttttcattccctaatctcctccttcttgtcagttccccggtgtcaccttcctgtaaaacaaaaaagcgaggggacatcctgttacggattctcctcgcttttgcgtaaaaaaatccgtggcatctttcgatcaccacggtctatcatcaggaatggtattgtcacattttcacgccatccgcatcttctcatacggcatgtgcattacttctgaccgttactccccaccgaggcaatcatatgattctgctttttcacttccacgacgttacttgtaattctactcataatgcttacctctctttccttaaaatttagattacatgttgtcttacaaaaaccagtatacgcatacctctttttaaatgtcaagaaaattctcataatttaccattataatatttgatttcgtgcaaataataggattaggaattacagtaattcattattgtactcctaaatcacaccggaagatgttccgggaaaacagacgacaatatggagggaaaaaccatgagtggatctagcaattctaattccggcacaaaccagatggcagtgccgcaggcaaaagaggcaatgaaccgttttaagcaggaagttgcaagtgagatcggtgtaccgttaaaggacggctacaacggcgacttgacttccgcacaggccggaagcatcggcggcgagatggtcaagaaaatgatcatgaagcaggaagagcagatgtccggcaaataaaccggcttcttctgccgattgcacaaaaacgggactgtcgctttaagcagacagtcccgtttggcgtgagaagaaataggacgagggaatcatgcccttcgatttcagatggaatgcagatggaatattttttgtgaaaaaatgagagcatttctttctgccggatatttgcatcggattccgtgtctcttccacgtttggacaatccgacggggacatgtccggcacaccaaagacaatgggcggactttctagccgccctaactgtactccctcatagacaatataaaaccgcgcgaaccgaaactcgttgccatctgctattaaaaacaaggcagatgacaattcagacatcggcttcgcgcggttatgttttattgcgacataaggatggctgatttatgccatccgttgtttggtactggtaagggcggcacaaaagtcctacaaattgtcttcggggtgcggacatgacccgtggagtgttccaaacttggaaagacacggatcatcgcggatgcaaatatccggctggttagaaatgccgcatttttgaacagaatttccatctgcattccatctgaaatcgcgaggcatgatcttcttgtcctattacttatcattccattacgtgtcacgccaaaaggggactgcccgtttcacgcggcagccccattttttgcttttttatttctcgtgcatccagacgcgcatctggtttaaaccacggttgccccatgcaaaataagggatcgcacgaagcgtaaccgcttcttccttcggcggttcctcggtatagagttcctccgacggcacaagccggatccccgccacatcgagcagtgtgagaccggaaagcttgccttccgtgcatacgagagcctttgcatccagttctttttttaccgcaagcgcctgcagataggctccgttgtcagcgccctcaaagcagtagaccacagatcctcgcatcagcgccacgcatccgacgtcctcgcgcacatgcgtactcgcataaattttgcgcaccggcagtggaaaatgaagttccacctgatcgtcgcttccccattttctgctgatgtacaaatagccatcacggatttctccggcagtatcaaacgcctccccgttgaccgtcacgcgcaggtctttcacataagccgggatatgaatggcaagtgtaaagagttcgtcgatcttcgcggacacatggtaggtcacgcttccctcccacgggtatgcgctctccacgcggatgtccgccttgccgagcgccgcctcctgtcccagaaacagatgggagtacaccgccgtctcgtcctcatcccacgcatattttccaagggaggtcaccatgcggaccaggttcggcgggcagcatgcgcacgcataccagcccggacgctccggaatcacatgtttgtaaccgaaaatctcgccggacacacccggattgacctccagcggattgacgtagaaaaaccgctttccgtcgagctgcataccgctgatgatgccattgtagagcgcccgctccatcacatcggcatatcttccgttcttctccgtctttaacatatttctcgcaaaaaagaccagaccgatcgacgcacaggtctccgcatagttcatatcgttcggcagttcatactcttttgtgaatgcctcgccctccacggtcgagccgatgcctccggtgatgaacatctttttctgcgtcatattctcccagagccgtctgcacgctgcaaacaacttctcatcgtgatcctccgccgcaagatctgccatcgccgtgtacatatatacggcgcgcacactgtgtcccacagcctcatcctgctcgtagattgtcgcatggctctggttgtactttgtgtcgtccgggatcatattgccaaaatgcgtccagcccctgcgctcggtctcctccttaaagaagttcggattctttccacgctcctcgaggaaatagcgcgccatgtccttgtaggcttcctttccggtcgcatggtacatgcgcatcagaccgatctccacctcctggtgtcccggaatgcccggaatcttatcctctccgaaccggttcatgatatgctgcgccatccgctccatcacgccgagcagcttgtcttttccggtcgcctcgtaatacgccactgccgcctccatcatatggcctgcgcagtagagttcatggcactctaacagattctgccagcggtgctccggctccttgatcgtgaaaaatgtattcagataaccgtccggctgctgtgcctttgcgataatgtcaatgatgtcgtccgcgcgctgttccaacgccgcatccggcttgatcacgagcgagtacgccacaccttccagccattttgccacatcgctgtcctggaataccatcccgtagaactcaccttccatcagtcctgccgcaatgcggaaattatccagcgcatggctcttctccacgccttcttctttatcgtttaataccctctcttgaaacggtatcacagtatctgtgatcttttcctgcataccgctccagaacgggtctttgatccgaatttgctgtaatgcaatctctttgctcatctcttttcccccatcagttccgatattcacgggtcatttccaattctctggcgagatcctccggcgtcctgtacttgcggaataccttctcgagcacatagtttttcaccagtgcaaacactcccggaaacagtacaatcaggcactgtgtatcgttgcacatcagaacaaacagcacaaacacagctactaaaagcgccgaccatcccagatttgccaccaccatcacaagcgtcttcttcatggactcccgtatggttccctcaaacctcgccatatacgccgtcaggtaaaactcccacgccagcgccatggcagaaagtacaataaaaaaataatacaacgcaccaagcgccgagccctgtgccagaaactgtctggtcaccacaaggtccgccgcaagaaacgctgccagtattccccacagcagccatgctcctgtggtctgtttcaaatccgttttcagagccgtgcaatattcccggaatgcatagccctgtccatgtacaatgcttttattgaccgcatggtacaccgccgctgtggcggctcccatggtaacgaccggaatgctgcatacaatccacagcgcgccgagaatcaggcagtccgccagtcctcccagtacgcggaaaacgttgttgttgtaatcaaaaaactgattcatatgccctccattccggtctaagccattcggttattttttcagacggatgcttaccacgctgcatgccggaatctgtacccgtatgccgtccgccgtcttctcgtaatctgcaaatgcctgctccgtcaccacttccggtgcctcaaacgtgttgtgtgcattcatcgttcctgccacaacactcgcctcgcatacgccgtatgcagcgccgtcgtccgtcagctggatggtcacattctccgcagcttccagtgaattgttggtcagtgtcactgtgatcacgccgtccgcgttctccgatacagactcaatcaccttcggcagttcgttcttgcctgctcctacggttccagcaccgatcagatcgcttctgagaagagttgctccctgatgatgacgatacatatggaatacatgataggtcggtgtcttgatcatcttctcgccgtcggtcagcatgacagactggagtacattgatgagctgtgcgatgcatgccatcttcacacggtcggaatgtttgttgaagatgttgagtgtcatacctgccacaagtgcatcacgcatggtgttctgctgatacaaaaatcccgggttggttcccggctctacgtccgtccagattccccactcgtcaacgatcagaccgatcttcttgtccggatcgtactcatccataatcgcaccgtggcggttgatgagttcgtccatgaaataacctctctttaaggtctggtagaaaatctcctccgtgaagtctgttgcgcttcccttcttattccagtcatcctccacctcaggaagtgtataataatgaagagaaagaccatccatcattccatggaaacgcggctcgcagtgatcaaaacaggtctccatcacctttttcgtccactcgtaatcatccacgttcggtccgcagcagatctttgcgatcgggtcatttccagcatagtttctcacatatgtctggtatctgcggtactcatctgcataatgctgcgggcgcatatttccgccgcatccccagttctcattgccgacaccgaagtaatcgatcttccacggctcctcatgaccgttctgcttgcgcaggtctgccatcggggatacgccgttgaacgtaatgtactctacccactcgctcatctcacgaaccgtaccgcttccgaggttgccgttgacataggtcttgcaaccaagctgacggcacagttcaaagaactcgtgtgttccgaagctgttgtcctcgacaacgccgccccagtgtgtattgatcattttctttctggatgctttcggtccgataccgtccatccagtgatattcgtctgcaaagcatccgcccggccagcgcagcaccggaatcttcatttcttttaatgcttccaccacatcggtgcgcattccgttgacattcgggatatcggaatcctctccgacataaagtccctcataaatacatcttcccagatgctccgagaaatgtccatagatttccggagcaatcgtgctcattttcttgtcgttattgatgactaattttgccatagtaacctcccgttatgtatcagtccctttcgagtttttgctgtcattgattcacatcagccctttacagctccggctgtcattccttcgatgatgtacttctggaagatcaggaaaatcaccaggatcggcaggattccgaacatggaaccggcgatcagcacatcatagttgtttccgtacggcgtcagcaatgtatttaatccgatcggaagggtgaacttttctgctcccttcagtaccagaagcggccacaggatcgcattccagcttcccattgcctgcagaattcccatggaggcgaatgccggcttcgtcagcggaagaatgatttttgtcgcaataccgtactctgtcgcaccgtcaatacgcgccgcatccagaagttctctcggaagtcccgacagatactgccggaagaagaaaatcgtcgatgcgttacatagtccgatgataattactccggtgtaggtatcgatcagatgcagtgcaataatttccttatataaaggaagcatcagaatctcaaacggtaccatcattgtcgcaattacaaggaagaagaggaaattcttcagcttgaaattgtacattgtcagtccatatgccacaaagtagcagatgaacaatgtcagaacgaccgacacgatcgtaataaccagagagttcttataccacataaaatatttctgactgtccgcatttccggaaaacaggtacttatagttatccagattcatcgtacggatatcgagatcgatcgacaatccacggcggatcagctctgttcctggtctgaaagaggcaagcagacctgcgaataccgggaagataataatcaggcttaagactgcgaaaaatcctgtgccgagaactgttcccactgtccgttttgtcttgccgctcttcgggcccttatcgccctttctgttcttctcatctgccatgttatttctcctcattcttaaatgttccatttgcaatcaactgaacgatattgatagcaagtgcgatcactaacagcaccacgccgaccgcgcatgcataacccatatcatttttctcgattccacgcttatacagatatccaacgatggtgagtccgatgttgttcggtgagttgttgcccgcccataacatgtaggattccaggaacattgccagtccggcatagatggaaatcgtgagcacgtagaccgtcgtcggcttcaaaaggggaagcgtcacatagcggaacttctgccatgcggatgcaccgtcaatctcagatgcctcatagagggaggagtcgatcgctttcagtcccgaaaggaagtagagcatattgacacccgtccatctccagcatgcaactaccagaagagccgtcatacctgaccatcccattttcagccatttataggtgccaagacccagtgctgcggtaataatattcatctgtcctgtcgaatattccgtgaacatcagtcggaataatgtaccggaaataaccacggaggtcaatgccggcatatagagaattgccttccacacaccttttgcttttaccagacggctgtccatcagcactgcaaaaagcatcgggaacggaatcaaaagcaccaacgtaaacagcatgtattttgtactgttccagattgccgtgtggaatacattatccttcaacaacttctggtaattggcaagacccacccactctgatttgattgctccgatgtcctgaaaactcattgtcacggatgtgatcaacggatagatccagaaaaacgcaaagcttaaaataaaaggtatgacaaaaatatatggcgctactttttccgaatacaagaacttttttaacttcaactcaacaccctctccttcttatgaaaacagggatgccagaggagaaccctccagacatccccattcccaaaacttatgtcctactgctcaagatcgactgcatcctgtaactcctggagagcatcagatacatccatgccgtcctcaagtacctcatttaatgttgtgttgcatacatactcgttgattgtcgggctgatcgctacaacagagatcttaccgatgttgtccataccgatggaattcaatacatcgtacggatagtttctgaagtatgcattgtactggttgctgtcgtcatgtgcaaaagcatcatctgtccagcatgcagtgttgcatacgtcgaatcctaatgtatcccagatattcttctcaccctcgtcagacatctttgcccagcaaaggaactcagctgcaagatctgcgctcgcagactgctgtgtcacaacggtacctgtaccaccgataccaacggagcacttctgacctgcctcaaataccgggcacttagcaatgtaccagttaccgctctcctcaggcatatagtttgtgaaacggctcatgtaccataatgccttcgggaaagatacgatgttgtgatccagaatgttctggaaaccagcctcaaggtctacatgtccatccggagaaacctctgcgaagccgctgtctaaccaggactgctgcatctctaacattttctgaacggaatcaagctgaacgtttgccggatcatcgaatccgccggtccagtcatcgccgtactcagccattgccagccataaccagtctgtaccgcctgtatctacggatgtgaagtatttgccttcctcaccgattgctgccacatactcatcaccgagtgcctgataatcatcccatgtaacaacggaatcaatcttagcagttacctcatcctcggaaattcccatagcttctgccatagctgccacgttatagtacattacggttgcacctacatggtacggagctccataataatgtccgtcctcccctgcgtaggtatccatacgtgctttaaccatagtctccatgtacggagctgcgtagtcatccagcggaaccagccactggtcaagacctgcaaccacgttcgggaactgtccaacctctacatcacagatgtccggtgcaccggttcctgcctgaagtgcggtaagaagctttgtgtgcatatcgctgtacggatatgtcgtacatgtgatctcgatcgtctgatccggatgctcctcgttccaaacctcagccatcttgccgtaatgctgtccgtgaagctctacgaatgtccacatctcaagatgtgttccgttcggatcaccgaatgtgttggtaacaacctctgactctgcggattctgttgcatcctctacagcgtcctctgctgctgcctctgtgccatcccctgttgtgcttcctgaatttgaagcagtggtagaagcatcagagcttccacatcctgcaaacagggatgtgaccattgctgcgcacatcagtgcactgaatactttccttctcatataattcttgccctcctccttgaattataggataataaaataagttgctaagatgatctgaaattcacataagatctcgtcataagctgggctcattagctatttcgacaatttctttgttcgatttcatttatcttatgtagataatatacaatgcatttcctgtggtgtcaatatttattttatgtttttccaaagtatttttgcttttcgctaaattatacaaaattatgaccgatatgtcctgtgataacgttttcgttttgtgcaacttgacatattgttttgtttttatttaaatatttttaatttcatccttaatagttgacacttttctataacaattctataataggaaactaataaagaacaccttaactagttccgtttttacaggaggatactcaggaaatgattcatattacttccttagacgatggtctggagacatttaaggctctcgggtctgacacacgtatccagattcttaatattttacttgaaaacgagcagatgagcatgaaccagcttgcgacagagctaaacatcagcaacggagctctcacaggtcacgtcaagaagctcgaagagtgcggtctgatcaatatctccaatgaatctgccggacacggcaatcagaaaatgtgttccgtgacgcaggaccgcatcattgtggacatcaagaaaccgattgattataagaatgtattcgagactgagatcaaggtcggacagttttccagacatcaggtgtggccgacctgcggcatcgccaccagcgaatccgtgatcggcgagttcgacgatatccggtactttaatcatccggatcgttttaccgccaacattctctggttcactaagggctatgtcgagtataccataccgaacctgatcccctccaaccagcggatcacgcagctttccatctcggcagagctgagttcggaggctcccggcatcgacaacaactggccgtcggatatcagtttttacatcaacgacaccaagatcggcatgtggacgtcccctggtgacttcggcgatgtgcacggtatgttcaccccgcagtggtggccgcagaactggaatcagtacggtctgttaaagctgttagtcatcaatgattacggcacctacatcgacggtcttaagatctccgatgtcagcacgctctcgcttcacctggactacaacagcgacatccgcctgcgtctcgcggtcgagaatgactccgagcatgtcggcggcatcacgctctatgggaaatctttcggaaactacgatcaggacatccgtgtcgccatcaattatgcgccgcttgtcgctgcgcagccgtagcgggggatttcttccgggcagttgtatagatagacattagctctgaaacggttgtggatgcagttgcgggaggtattctgatcgcaaaatccggtatttctaaccataccgcgtccggcatccttgatgatctgtgtctttccaagctttgaacactccgcaggatgtgtccgcaagccggcagacaattttaggacttttgtgtggcgcttattgccactgatgaacaaaacataaccgcgcgaagccgatgtttgaattggcatctgccttattttcaatagcagatgccaacgagtttcggttcgcgcggttttatattgtttgtgaagaagtggcattagcgccactaaaaagtccgctcattgtctgcgggttgccggacacacctgtggattgtcaaagcgtggcaaagacacggaatttgatgccggacgcggcacggaagaaatactcgcattttgctttaaagaatacctcccgcagctgcatccgcaacctctttcgttcttttgttctccatacaactgtccgggatcatgtctctcccactacggctgtgcgtcgactaccgcttcttcgggctgcggatacagctgcggcactaccacttcttcttcgggcaccgtgacactttcgccactgcgcgcagttccacgtagcagccgcacgccatacaggttccggcattcagcttctcacaatcctgacagaccgagagtctgctctcgtagatttcctctgtgacccggtccgcctctttgatcgcagcgcggtatttttcaatcatttccatactgtcccccgcctcgatcatatcccgaagcagacagcgcgtacacactctcttctccatcatctcatgcccacatttctgaatttttaccggcaatcctactcgtcgaacccgaacaccggtcggccgtcctgccatctgatcttcataagcattgcatgacggttcggattgtacagcgggttgcccacaatctccgtctccgttctcgcatggtagaccataatgtcatctcctgcctcatccttcgtgaaggaattatgtcccggaccgtagattcccgctttttcactggatgtaagtaccggatagcgctcttttttccaggagagcggatctaacagatctgcgtctgcatccgccgtcatcatacccatgcagtaatgcacgccggtatcgctggcggaatacgtcataaatactttgccgtccttctgaatgaccgccggtccctcatttacccagaagccgtggcgctcccagtcgtaatccggcgttgtcagaagaacctgcacggaatccagcgtgtagccgttcttcattctggcgatgtaaagattggaaatctgcctgccgactcccactttttccgcccagatgtaataccagcttccgtttacctcgaagacggtcgcatccagggaaaatgcctcaaacgagaattcatctccatctgcacgggtcatcttgcctttttccacccacggatcatgtaccgggtcatcaccctggcattccagcacatacgggcggatcgcccagatgtcgtccttatcgccgccggcatagtagagataccattttccaaagagataatgcagttccggcgcccagatatggatgctctgcggtccgctctcgtgcttgtgccacacctcatgctcttcggcatccgccagatccgcaagatgtgcggcacggcgcagaacaatcctgtcgtattccggcaccgatgcggtaaaatagtaggttccgtccgtgtgacagtacacataaggatctgccctctgcagaatccacggctcattatatttcaactgtttctccatctttttctccttataaagatccggctgagcccttgccggacgctttgcttttttattctgttttattctggtttattccgcgatatatttcacaccccagacactctggtttccgcccacggcagaaaatgtcatcacatcggtgcctgcctcgtctttcatctggcagaacacgccgctgtagtcctctccgtcaatcgtaatgtgcatatagtacgttccgtcaacagcttcccaggttcccgctgcctctcttccgacgactgtaccgtcagcattcaggtacaggatcaccgggttggcaatgtcattgctgatattggttccctgattgatcacaaaatatcttccgaccacggcatccgtctcataaccggtaccgctcaccgtctctccctgtgtctgatacggcagttcgcacggccatccgtcctcgttcatcagcatctgatgtacgcgcggcgaatgattttccgtgccgttgttaaaacgggtatggtagaccagatactgtctgccgtcctcatcgatgaatgcagagttatgtccggtcgccatgtacgcgcgctctaaggacggaagcttgtaattgccggtcagcttcagaccgtaaagctgatgatccacatccgcggtcgggtattccccgttcatatccacataatcgccgtccacggtcttggaacggaacacgcgcacctgatagccgccgctgcttgtgagcgtaccgtaagatacatacaggtaatagtaatccgtcgcctcgtcatagaggatgtaaggtccctcaatggatttgtgtccgcctccgagcagacgctttccgtagtaggcatccacattgtgttcctcgtccgcctccggatgaatcacctgtccggtcgccggatccagctccagcaggaaaataccgccgctccaggaaccatagaccatccacatgcggtcgtcggcatcataaaataccgtcgggtcgatcgcattcggatattcctcaaagttataaccgttgtttctcacataatgctttaacgcatattcctcgtccacataatccagcacatcggttcctgcaatcgtgtccttgtcaaaaccggaatagataagcgctccctgccactcgtaaggcccctcgatcgtcttcgatgtcccgtagcacagattcgatgcattccaggtggatgtcgtgcaatagtacatgtaatacagtccggtcttcttgttatagattacatccggtgcccagacatgtgttttcttatcatctgtctgaatcaggctgttcttgctgccagcgtaggcaaacgcctcgtctgccacaccatagatctggccgtagaccggattcgtcttgttgtatccgtccgcaatggactcccagtgcagcagatcttcactttttgctgcagacatatgggaaccgaagatataataagttccgtcttcctcatagattgacggatcatgtaccgccaccccagaggaaacgtccccggtctgaatcccgtcgtagctcaccgtaaaattgtaatcggtattctccggcgtctcagactccgtcacattctctgccgcctctgtcgttccgcaggcagcaagtccggcggtcattgccgccacaagcagaacagaaatggttctccttccatttcgcataaaaaaacctcccatgatcttcattgcccagctttagctacaatatatcagataacaggaggtaatacaatatttatttttagttttgttaaagtattttacattttatcaaagtttaattcaaataaaaggttgccgccttcttatcgcttccgtcggtgagcaccagtttgccgtcctgcagcgtcagatattgtcccggcatgagcacgctctcaaaggaaactcccttcttgtcggacaatccctccatcgtgtggaatgtctgcgcctgcgccgtctcctccgcggcatccacatcctgtgccagcacaacggtgccgtctgtctgtgctgtcaggtacagtcccgacttgttctcggactggatggacacgtaatattcgttggatgcatccgcctttccgtcacagagcacccatttctcatccgtcgacagatctccgagtccggttccgaccttgacatttttcatcggataatccacatccgccgatgaattgacgaatccctcgtgcgagagcagcgccccgtcgcccgccgcggactgtaacgtcactgcggtaccggcaagtcccgccgtcgtctcctcgaagtaatcgatgctgccgtcgtcattgaaatgcagctccgtgatgcatgcgcttctgcggtaaccgttgcctcccggcagcgagccgttgtgatagacaaaatacgtcttgcctttaaaatcaaagaccgccatatggttcgtgttcgaggtcgaagtcgggtacattatgacattgccgaatgtccagtcaccgctggttaaatccggcgctgtcgcatatgccatgcattctctccacccgtacgcgtaaaacagataataatctccgtagtagttgccctgttcatccgatctgcggtacagccacggcgcctcggtgtaattctcaatgccgcccttctgatacatgatgtccgcatcgtcaaacgaagtaccgctggtaatctccccgtctccgttcatatccttgactgaaatcatatcctcattgagctcgcacatgaaaaacatgccgttgccccacgccagataccggtgctcctcaccgttttcatccgtctccacccacgccgttggatcaatgtcattgaaggtggaaagctgcggcttcgtcacagaaccgcgcacaagcggttctccgatatcgacaaacgtgcccgtcggactgtccgccaccgccacgccgatcgactgcttgccggatttatcccagctgcagtagtacagataatacttgtcgttgtatttcatgacctggcttgcccaagccgatacatcatccttcgcccagtccacggtatccatcgtcatgacggttccctcagacttccagttcaccagatccgtggaggaataacacagatattccggtatctcataaacggaattcgccacctgttcgtccgtcgacgcgtcgtgtcccgtgtacagatacacggtatctccgtccaccagaaccgatggatctccgccataaatccgctctccgccttcatccgtttttacaatcggattgctgctctccgtcttggcaagcgccacctctttcgcctcaccgcagccggtcagacctgccgccataaccagcgatgccgccactattccataaccatacatccccgggtttttccgtgcactctgccgcttccagctcccccgccatcttttcgtcgtcctgtctgtaaacatttccttctccttttaccgatctcagacgttctctgcaccgagccccgttttcacctgcagattaccatttacctgtaacgcttccatcgtacgacttgtatggtcatgtacacaagttgtattttatggagttgccgctttccgtgtcctgccccctttagcgataagtaatattataaaaagtacctgatacagatttcgggtggaatgcctatggaacattctgttcaaaaaatgtggcatttctaaccagccggcggctgcatctgcgatgatccgtgtctttccaagtttggaacactctagtggggcatgtccgcaccccgcgagacaattcgtaggactttcgtgcagcacttacctgtgctcccgcaatagaacataaccgcgcgaagccgatgtctgagctgctatctgccctgatttcaatagctgatagcagcgagtttcggttcgcgcggtttaatattgtctatgagggagcacagttagtgctgccagaaagtccgcccattgtctccggtgtgtcggacatgcgcccaccaggtgtccaaacgtggaagagacacggaatcagatgcagtcatccggctggaaaaattgcacgcatttttctccaacgaatgttccataggcattccaccagaaatcgtaacggtgtacttctcataatattacttatatattacttatcgctaaaaggagcaatacacggaaagcagcagccccataaaacacgccgcatggaggactctggcagacacttattactgcaccacgtgatataccagtccgtccttgatgtgctccactgccgcatcatccgcaaaatagcgaacaatctcgagcgcaaacggaattgcagttcccattccgcggcttgtgatgatgtttccgtccacaaccacggcgtcctcactcgttgccgcacccgtcagcttttcctcaaaccccggatggcaggttgcacgtctgccctccagaataccggcagctccaagaacgctcggcgccgcgcagatggctgccaccagttttccctctcccgcaaacttcttaatcacttcgtttaccgccgcgtggtcgagcagatgcagggttcccggcattccgcccggcagcacgatcccgtcaagtgcgccataatccacttcttccgctacggcgtccgccaaaaaggtcacgccgtgggaactggtcacttctctttttccgttcacggagatcatcgtaatgtccatcttcgcgcggcgcacaatatccaccacggtcagtccctcaatctcctcacatccgtctgccataaaaattccaattttactcatcataattctcctcttttctttttcttcgctttcacttctgcattcactatattacgcagtgcacgctcgaaatgctgcgcattcctcgctgccgggctttcgccctatcaaaagagtaccacactttgcaaaaacgtgctatgatagaatcaatacacaatcaatgcatcagcatgtctgccgccagccggaacactccctgcggcagccggaaaggaattcacatggaaatcgaacgcaagtatctcgtcaagatcctgccggaccacttggagcagtacccctgcaggcagattgagcagggctatctgagcacgaacccggtcgtgcgcatccggcgcagcaatgaccgctatattctgacttacaagggaaaaggactcatggtccgtgaggaatataatcttcccctgaacgaagagtccttcacccatttaaaagaaaaaattgacggtcttctgattcagaagcgccgctatctgattccgctcggggaaaaatataccattgagctggatgtatttgagggagcgcttgccccgctcgtgctcgcggaagtcgagtttgagactgaggaagaagcgaatacgtttgtcccgcccgagtggttcggcgaggacgtcacgttctccacaaaatatcacaacagcaccttaagccagcgcaccttttcttcctgaaccggggcatcagcccaggcgccccgcctcctttaacaggcggtacaaagtcggatccagatggaactcctccatcatgcgctccacctcgccgaggtaccgcttgcggacggcggcaggcacgatcgctctcgccgcatcggatccgccttttttcactgcgcggatcagaaggttcttcggcgtatgggcaaagtctacaaattccagcacctgcgtcttatagccgcagcactcaagcagattcgcgcggattgcgtccgtggcaagtgccgcaaagcgctccttaataattccgtagcgcgtcatcagtcccagatcctccgactggatctgtccgtttaattcatgctggcagcacggcacggaaagaatcatgcgcgcgttccacatgatggcgttgtacagtgcataatccgtcgcagtgtcgcaggcgtgaagcgtcaccaccatatccaccggcgcatccgtgcggtatccgttaatgtctcccacctcaaaatgcagattctcatagccgtactttttcgcggcggcattgcagttcttaatcacgtccgctttcaggtcaagccctgcaatctgcacgtttcttttctgaatctccgtaaaatagtaatatagcacgaatgtcaggtaagattttccacagccaaaatcaatgatgtgaagtgtttctgatgtatcgtccccgaccgcatcaccgaccatctcattctggaaaaggaaacaaactataacatgagagtttgatcctggctcaggatgaacgctggcggcgtgcttaacacatgcaagtcgaacgaagcactttaattgatttcttcggaatgaagtttttgtgactgagtggcggacgggtgagtaacgcgtgggtaacctgcctcatacagggggataacagttggaaacgactgctaataccgcataagcgcacaggattgcatgatccagtgtgaaaaactccggtggtatgagatggacccgcgtctgattagccagttggcggggtaacggcccaccaaagcgacgatcagtagccgacctgagagggtgaccggccacattgggactgagacacggcccaaactcctacgggaggcagcagtggggaatattgcacaatgggggaaaccctgatgcagcgacgccgcgtgagcgaagaagtatttcggtatgtaaagctctatcagcagggaagaagaatgacggtacctgactaagaagcaccggctaaatacgtgccagcagccgcggtaatacgtatggtgcaagcgttatccggatttactgggtgtaaagggagcgcaggcggtacggcaagtctgatgtgaaatcccggggctcaaccccggtactgcattggaaactgtcggactagagtgtcggaggggtaagtggaattcctagtgtagcggtgaaatgcgtagatattaggaggaacaccagtggcgaaggcggcttactggacgattactgacgctgaggctcgaaagcgtggggagcaaacaggattagataccctggtagtccacgccgtaaacgatgaatactaggtgtcggggagcattgctcttcggtgccgcagcaaacgcaataagtattccacctggggagtacgttcgcaagaatgaaactcaaaggaattgacggggatccgttcagtatgtatccgtcatccgtcccggcgaaaaagttgcgaagctggtcaagcggatgcactatgtatcctttgtggggatgttccggtctgatctctttgagggcctgtgtgttggtcatgcaccgaagaaatgccggatctgcggcaagtggtttctgaccaccaacgcaaggcacaccaaatactgcggcggctatgcaccgggggacaagctgcaccgcacttgccgacagatcggcaacctgaaaggcagagaacaacgggagcttgcggacgatcatccggtgaaacagatttatgagaaacggctgaattttccctgccgaaagaatggagcagacaggaacagattgattatacaaccgaatatattcaaaagactttcgtggataagggaatgtgtgtcgactggagcatacacgataagaacgatggaaatccacatgtgcatttacttgtaaccatgcgaccattcaatccagaccactcatggggcaacaaggaagtcaaggactgggattttgtcagagatactgacggaaatatcgtggttgatgaatcccacccggactggtggcaggataagaaaaatcctgaccggcatggaatccgcattccggtacttgatgaaaacggagtacagaaagtcggggcaagaaaccgaaaacaatggaaacgggttctgaccgatgctaccggctggaataatccaaagaattgtgagttatggcgaagcgaatgggctaggatgtgtaaccggcatttatccatagacaatcagattgaccaccgctcttatgaaagacagggcaaattaaaagtccctacgattcatgagggtgcggatgcaagaaagattgaggaaaaatatctcaccggacagataaggaaaggttcatggaaggttgaggaaaaccagatgattaaaaaacaaaatgcactattgcaaaaggtaattgaaacctttggtaaggtatccggtgcattgtcgatgtggagggagtggttgaatgacattagaagaaagcaaagaagtaattcccatgatggaagcaatgattacacagatagaggaacagcagaatatcatggcagagatgcttcaggagatacaggaaaaggacgagaagctgatgtgttttcaggagcaggaagaacgattgcagcaattagagagcgaattatcagagctgctacaaatcttaccgaatacagaagaactgttgatgcttctggaagaaaagacagaccagatacagaaactcacagacgaaaatcagcaatggcaggaattggcacagaaattaaacagcgagaaccggctattgcagaaacagaacagcgaattgttgaacttgaacagcaattagagaaaggaaggtcgattgatgaacgaattaagaaactcaaagagcgacgatcaactggaagagttgcttctgctgacagagcagatgcaggaagaactcgaccagaaagacaggactatccgggaactgaaaatgcagctcgacgaatcgctgaccttgaacgagaggttaaacagcgagaacagagcagggaacattcaagccttaaagaacgacttgaggaaaacaaaagaattgttgcagagcgagaaagagaaaacgcacgctgccgaaatcatgacagaggaatgtcaagataagctaaggcaggcagaacaggaacgggactatgcactctctcatcagaaaaaagtagagataccggttgaaaagccggtactctatcaaaagtgtgggaactgtaacctgacagcttatctgaaagctaaggaaaggtatgatacacagagagaaaaactggcaggcagatataaagcaaaaacagctatatatgaagcattgatgtttctgctgatatggtattccgtatcaactactctttttcagatgatacggtcaaaaatatttatttctgattgcgtggtattctttgatacaatcgccacttttatacagaacattgcaggattgactatactggcagggaagaatgtggcacaggttagcaatggaatatccaatcctgtcgttgtcggaattatatactggatgataagaatactgatttccggtggatgtctggtgggtgtgggaatacttttggcattcatcgaaataaagattgcagggctatataagaaatactgttgggatatgattaccataatggtgatactcgtaagtatggcaatagcaatctatttcgcaggttggataaggacaatattaccagtcaatctactgtttctattgttattggtacaggtaatatatgtcgtgataagatggtatgtgaaaggctggcgggaaacaaggggatattactaaaacatactataccatgcctaaaactgttaaacaataaatcggcataattggtcatttcatgatgcaagataaaaagactgattatgtcgatatacagatcctgtgaatgaatgaaagtggataacttgttttgtccgagcaagggaactataatgttttggtagaagtaaaaaagacaaccatttggttgagaaaaaaagatgcagaaaaacctattgacggaagaataaaaaatcaaggagtaatcatgatagaaaacaagataatattgattgaagatgataaagaaataagaggaatgataaacgattatttatcaggagaatttgaagtgacagcttttaatgatggtatgtcagctatccagaaaattacaagctatgatgaatatgcgcttgcgcttattgatcttatgttaccggatataagcgggatggagattattaagataattcgtaaagtcagcaagataccaattattattattactgctaaagacaatgatatagacaaatcattaggattgaatttgggtgctgatgattatgtggtaaaacctttttcactcattgagcttactgctagaataaaggctaacatcagacgagcaagaacctaccaggcgttaccgaataattcaattatcaaaattaaagatatagaaatcgaccctcatagtcacatggttcagcgcaaaggagtaaccatagatttaacgccaattgaatttcaaattttatacattttagcaagccatccggggcaggcttattcaaaggaaaggctatatgaactgatttggaaagaaccatattttggaaatgaaaatgtgttgaatacacacatcaatcgtcttcgcttgaaattgaagagcaatgcagaagacagtacagcctatgttaaaactttatggggcattggatataagatggaggagaaatagatgatgattttatttgtggttctttcatttgttatggtttttatattgatctggcaacagatacagcataaaaaattagtacgagaaattgattatattacaagtaggcttgatactatttctgtcatttctgaaaatggctttgtacttatacctacagataatgatagtatcaagaaattaagcgctgcacttaataagctgcttcaggatttttatacaaaaaagtcacaatttgagcagagtaaacaggcaatggcgaaagtccttacaaacatctctcacgacatccgaactccactcactgttctaaaaggaaatagtgaaatgctttccaatataacaaacacttactctgcatctgaaaatgttcatgctatggctgttaaaatagaccaaaaggctgatgatttaatctcaacaattaacgactattttacaatgtctaaaataacttctggagatttttctattaaaatgaaaaaggaaaatatatcaaggatttgccaagatacaattttggactactatgaccttcttgaacagaaacaatttgaagtcaatattcagataccggatacaccgatttttgcctatacagataacgaggcgttacaacgcattttaaaaaatctgatagacaatgccatccgacatggtggtgatggtaagtatatttctttaaggctcatcacatcaaatggaaaaaacattattgaaatagaagatcgaggagatgggatatcaccacagcagcaaaaacagatctttgaaaggaattatacaacagcccgaaaaacttccggcagtggtttggggctttcaatttcaaaatgtcttgctgaacaaattggggcagacttagaagtttatagtgtacaaaatgagcaaactattttctcaatcatcttgaaaaagttagaaaatcgttagatttatgacagagaaaagagaagtccattttgtataatggcagctataaaggaggcacacaaaatggattatattatggaaaccgtaggtttgcgaaaagcctacaaagataatattgttgtagacgatgtaaatatgcatatatctaaaggggcaatatatggctttgttggtccaaacggcgcaggaaaaagcacggttatgaaaatgattttgagtcttatccagccagatgctggagaggttcagcttttaggcgaaaaagttaccagtcacagttatgaaatattcaaaaaggttggttctattattgagaatccatacttttacgataaaatgactgccagacaaaacttagagctgcactgtgagtatatgggatttcccaacaaggaacgaatcgatgaggttttgcatttggtggacttgcagaatgtcgagaaaaaacaagtttgtcattactcgttgggtatgaaacaacgacttgctattgcaagagctattctggcaaagccagaatttttgattttagacgaaccgatcaatgctttagaccctgagggtattcgtgaaatgcgaaccctttttcaacggctaaatcaagaagatggaacaactatttttatatccagccacattctatccgaagtggatcttcttgctgatacgattggaattattcaacacggaaaactcttaacagaattacctatcgaagaaatccataagcatcaaacagattatatcagcttgcaggttgacgatgtgactcgtgttactgcactgcttgaaaacatgagaatcacgaattttagtgtattagataaagaatttatccacatttatgattctgatatttcaggtaaagctctgtcaaaagccatcattgagaacgggattggtttggagagcatgggacgcaagcaagacacactggaagatttctttttccagcttacagaggaggaaaaatgagatgacacatttgatcaaactggaactgaaaaaatttggtattgcacaaaatattatctttatgtttgccgcaattcttttcagcatccttttcattacaatatctttatgggatagcatgacagaccccaaacaggtcaaagacacatttgaaagcacataccttgtcattggcttattgatgtcattcatttttcttgtgtactcgtcggtcttaacggcaaagctggttattggagaatataatcatcgaacaattacgattatgttttcttatcctttaaacagaataaaattgattgccagcaaattaactataatcatggtttatacagcgatttcaatgacgattggatatatctgttgtagcagttatattatatttgcggataaatcctttaatatgctggagggaacatttcaaccatcaatgctccgaacatggataccaatggcaataaccactgtgattatatgtatggtgctgtctctgtggtcatttattattggcatgatcagaaaatctgttcctgcaacaatcgttacttctttgattgttattgtgttacggcaagttattatcaccaaaaacacaaccaatcaggagtccataatgcaagttatcttagttgctattgttaccgtcattgctacactacttatctttaaaagaaaagtgcctgaactatattgattatttctatttttacaaatggtaaaagaaaaagccgtcgcaaagcagattcaatttcatgtatttatataacggcggctttgatttttaaagtcaatgtttttagtgattacacaaacagatgacaacttacatgtatgtggtagctgacgtaagtttggattattttaaaagatttccaatgaatcttccgcatctacccacatctgcatattcccatccagatataatcgtacatattcaagcggttcatcaattgcaagtgcatttaatgcacaatctgagccaggcgtagtttttaaattcttttctgcttcccaacagtcaatgcggagcatatagctcgcagaggtataaacatcaacactattacgttgtggattgtattctgcaaatattgttctcattgtatcaaatctccttatcattcaatcaatcatttcttacaaaaatcagaagcgtttcaatcagttcaccatgtcattttcattttgtgctataatgtgttatcagtttttttgcccttgtatttgcccttatcagagttcgtaaacactggtgggacgatataacacaagggaaacaataagggaaagctcacctgcgccaaacttagtgttttcaaaggcttgagagatatttgataataaaagataacaattattaaatcccttggaatacatgaaatctcaattcaagtttgtcgggtaaatagcaaacccagccgagccagtcaacggtcaagatgaacggcgcatatgcgcagccgttgacagccccgcccgcctttgctggtaggcaatcaaggggcgacagcaagaagtgccaccgccccgcactattattcagaaaggggaatttccatgaccgaccagatagcctatcaagaatatatccagcgcaggtacaacgccttttgcaagactgttatccgctgtgccgccttggacaagattttgaagcttaaacggcaatgggaacggcaagtttcccttgactatctgatgaacgagaagtttgtccagtttgccgcgtcggagccggacgaggaatacccatttaccgtctgcggtcagaccgtcctgctctgcaacgccgcccttgccgacgcgatctctgttttgccggagcagacgcgggaagaaatcctgcgctattactttctgcgccagccgcagcgcgtgatcggcgcgtgtattggccggtcacgcagcacagcggggcggcatatccagcttgccttgcagcggctacgcgaagaaatgggggtgagccggtatgagtagacttctcccctatgaaacaatcctcaaagcccgtgagggcgacccagaagccgtgaacgctgtcctgctccactacgccggatatatccgctatttctcaaaagtgaacgggcaggtcaacgccgaggtggaggactatgtaaagcagcggttaattgactgtcaattcaagttccggcttgacgaaccaccggacaagtcataaaaactgaataccagccgccaccgacgcggccagcgaaagcagtaagtcttgaaaaagatttactgctttttttgttgtccggctccgctcccggccattttgccccctgccggttgtagtagtaagcgaggagggaatttttctgccctggtgtttggcatttggagcatttacccgtagtagagggcaaagagaaaggatttctccaacaccgggtagaaaccactgcgtccggtgtcattttagcgaaagcgggcaggaatgccctttacaggattagtagtagcagaaaaagagaaacaaacttttgtggttgcagttttccaaaaaagtggcggacggaagtgagagaaagtttgcagtcacggagagcaagtttctaccacggtgccaaaatccgcaattctgcagttttgcccctcgcgggaaacttgttggggagtgccttccccaaaccctgctcatgcgcccttacgggcgagaaaggaggtcacaccatgcgaaagaaatacaacacgccccaccgcagccgcgttgtgaaaacccggctgtccgaagatgagtatgccgacttcacagcgcggcttgcgccctatggtatcagccagtccgaatttctccggcaggcgatacggcgggcgaccatacgcccggttgtccatgtgtcgtcggtcaatgacgagttgctttccgctgtcgggaagctgacagccgagtacggcaggatcggcggcaacctcaatcagattgcccggtatctgaacgaatacggcgtaccctacaacaccctttccggcgaggtacgcgccgccatatccgaccttgccgtcctcaagtatgaagtcctcaagaaagtaggtgacgcggttggcaacactcaagcatatcaactctaaaaacgccgactacggagccgccgagcaatatcttctctttgagcatgacgagtttaccatgaagcccgtccttgatgaaaccggcaggcttatcccccgcgaggactaccggctgtccacgctgaactgcgacggggaggattttgccgttgcgtgtatgcgggccaatctccgctatcagaaaaaccagcggcgggaagatgtgaaaagccaccactacatcatcagctttgacccgcgggacgggccggacaacggcctgaccgtagaccgggcgcaggcgttgggggaacaattctgtaaagagcattttcccggccaccaggcccttgtctgcacccacccggacgggcataaccacagcggcaacattcatgtgcatatcgtcataaacagcctgcggattgaggaagtgccgttcctgccctacatggacaggccggccgatacgaaagtcggctgcaagcaccgatgtaccgacgctgccctgcgctacttcaaatccgaagtcatggagatgtgccaccgggaggggctttatcaaatcgacctcttgaacggcagcaagaaccgcgtcaccgaccgggagtattgggcgcagaaaaagggacaggccgcgctggacaagcagaacgcccccatgattgccgatagtatcacgccccggcagaccaagtttgaaacgaacaaggagaagctgcggcagaccctacggaaagcccttgccaccgccgccagctttgacgagttttcctctctgttgctgcaggagggtgtgaccgtcaaggagagccgggggcggctttcctacctcacgccggacaggacaaagccaattaccgcccggaagctgggcgacgattttgaccgcgccgctgtctttgccgttttagagcaaaacgccgccagagcagccgaagcgccagccagatcccccgatcccccacgcaccataaaagaccgcttgcaggttgccagagccgagatagccgccccgaaacaggacggagtgcagcggcttgtggacattgagcagaaaatggccgagggcaaaggccggggctatgaacgctgggcgaagatacacaatctgaagcaggccgccaaaacgctgtccgtctaccagcaatacggctttacttccccggagcagttagaagccgccgttgacaccgcctatcagaaaatgcgccagaccagcggcgaactgaaagcactggaaacgaagctgcaagggaaaaagaagttgcagcggcaggtgttggcctacgcccagaccaaggccgcccgcgacgggctgcgggcacagaaatccgagaaagcccgcgccgcataccggcaggcccatgagagcgattttatcatagccgacgcagcagcccggtatttcaaggcgcatggcattaccaagctgcccgcccggaaagcgttgcaggccgagatcgagcagcttatctccgagaaagacggcctgtataacacctatcacgaacagaaacagcggttcaaggagttgcagaccgtcaagcggaacatcgaccagattttgcgccgggacgagccgcaccgcagaaaggagcagagccatgagcgataacctgccccacatggactaccgccagcaccggcgggcgcggcggctggtacatgagtgctgtaactacgatgaggggaactgcctgctattggacgacggggagccttgcgtgtgcgtccagagcatttccttttccctcatgtgccactggttccgtgtggctgtcctgccccttgacggggagctggccgcagccctcttgtgccggggaagccggaaacggtgtgccgtctgcggggcggcctttgtccccaaatccaaccggggaaaatactgccccgactgcgccgggcgcatgaagaaaatcaaagccgccgagagaaagcggaaacaaaggcagagatgtcacgctttagagcctttcaaacccgcataaatcaaggcttttttcgtgggtgtcaaagggtacgcgatacatttatccttttcccccggaaacggcgttttaatgcgtgacaatacgccaaaatcaacccgaacacagggaggtgatcctatcgctgattatatcagggcagacacgcggctgcccgcctatctgccgtatccccgtttcctgctgaaaatggagatttcacagaccgccaagctgctgtattcgctgctgttagaccgttccaccctctcccagaaaaacaagtggctggacgacgagggcaggatttatattatctatcccatcgcggagatagcagaaatactggataaaggcagcaccaccatcaagggggcgcttaatgaactggacacggcggggctgttggaacgggaacggggcggcttctccgcaccgaaccggctttatgtcaaagtaccgccagtgccacaggtacagttttcagaccaactgatggccggaagtccgcccctcatagagccggaaaaccgtcctactgatggtcagaaaaccgaccttatgatggtcggaaaaccgtcccctaaccaaactactataaacaaccttacagagagccaaacaaagggagtgagtggggggccgtccgcgccctatggccgatatggaaatatttttctgtcacagaccgaatacgacgagttgcaggcagagtaccctgacaggctggaacggttcatcgaggaaatgagccgctaccttgccgccaacgggaaaagctaccagaactatgccgccgccctgcggatatgggcggggaacgacaaaaaggaagcccctaaaaagggcataccagactactcatgcaaggagggcgagagtttatgaagaatgaaatcaacgcggttttggagaatatgacgaccaccatcccggagccggaggactacaccggcgaggacggtttactgtactgcggcaagtgccgcaagccgaaagaagcctattttgcgccggataaggccgctatcttcgggcgcgaccgccacccggcagagtgcgactgccagagaaccgcccgcgaggaacgggaagccgccgaaaagcggcgcagacaccttgacaccgtggaagaactgaaacgccggggctttaccgaccccaccatgcgggactggactttcgagaacgacaacggcaggaacccgcagaccgggcttgcccgccggtatgtggagcattgggaagatatgcggacagacaatatcggctgcctgttctggggcggcgtaggcaccggcaaaagctaccttgcaggctgtatcgcaaacgccctcatggagaaagaaatccccgtccgcatgacgaactttgctcttatcctcaatgaccttgccgccagctttgaggggcgcaacgagtacatttcccgcctttgtcgttatccgctgctgatccttgacgacttcggcatggaacgcgggacggaatacgggctggaacaggtgttcaatgtgattgacagccgttaccgcagcggcaagccgctgatcgtcacgaccaaccttacgctggacgacctgcacaacccggaggacaccgcccattcccggatttatgaccgcctgctttccatgtgcgtcccggtacgctttaccggcgacaacttccggcaggaaaccgccaagcggaaaatggagagcatgaagaaactgattaccgactgaaaggagtattgcctatggcagataacaagcagcacgacacccgcaccacccgccgccctgactgtgtgacggaaatccgcatgggcaattccgtccttgtcgtgtccggctatttcaagaaagacaccacaaccacagccgccgacaaaatggcgcgggtactggaagcggaagccgctgctacacaggagccgacttatccggcgtgaaccggggcatggaaaagcggccatgccagggagcatgaccgctggaacgaaaatcggaagtgctttagcaattcttaatctcattctctataaaataatttgcaatttcaaaggcttttattcttctctttgccaatgtgatttgtgatttataacgctcggaattatcctttgattcaaatgtttttactgtttctcttagcttgtgcagagttgaatcaatttgccttttggccgcggttaattcatctattgtatacttcatgttttctcctttaacttctgatttttttgttaaatcagagtataccacggagttatgaacttttctactgcaaatatgggacgacaacccataccataaaaatcggaaaattgaaaagctgtaaagaagcaaatttaacgcttttgccgctgtacagcccccgccgttccgtggtacaatgaaaccacggaatagtggggctggctgtcggaaacggaggattttatgttaagacaagccacccaaaacctcattaccgccctttatccgagattgtcccacgaggatgaattgcaaggcgagagtaattccatatcgaaccaaaaaaggatactcgaaacctacgcaaaacagaacggctttaccaatctgcgctggtacaccgacgacggtttttccggcgcgaacttccagcggcccggatttcaagccatgcttgcggacattgaagccgggaaagtgggtacggtcatcgtcaaggacatgagccggttagggcgaaactacttgcaggtagggttttacacggaaatgctgttccctcaaaagggtgtgcgttttatcgctgtcaacgataatgtggacagtgccagcgagggcatggacaacgattttaccccgctgcgaaatctgttcaatgaatggctggtgagagatacgagcaagaaaatcaaggcagtgaaaaagtcaaaaggcatgagcggcaagcctgttaccagcaagccggtttacggctatgtgatggacgaggacgagaattttattatagacgaggaagccgccccggtggtgcagcagatttaccagctttgccttgccgggaacggcccgaccaagattgcccgtatgctgacggagcagcaaatccccacgccggggacgctggaatatcagcggacaggcagcacccgccgttatcacccaggctatgagtgcaaatgggcgaccaacaccgtcgttcatatcctcgaaaaccgagagtacaccggatgtctggtgaacttcaaaacggaaaagccttcttataaggtcaagcacagcatagagaaccccgtcgagaagcaggccattttcgagaaccaccatgagccgatcatcgacaaggaaacatgggaacgggtgcaggagttacgcaaacagcgcaaacgcccgaaccgctacgatgaagtggggctgttctccgggattttgttctgcgccgactgcggccatgtgctgtatcagcagcggtatcagaacaaagaccgcaaacaggactgctacatctgcggcagctacaagaagcgcacccgcaactgtacggcgcactttatccgcaccgatctgttgaccgctggtgtcctggcaaatctccggcaagtgaccgaatacgcagccaagcatgagagccggtttgtgaaactacttgtccagcagaacgagatcggcggcaagcgaaagaccgccgcagccatcaagcagcttgaacaggcgcaggaacgcatttctgaaatcagccgcattatcaagcggctgtatgaggacaatgtaaacggcaaaatcagcgatgagcgtttcatggaactgtcggctgactacgaagccgagcaagcggagctgaaaaagagagccgccgccctgcaagccgaactggacaagtcacaggcagctaccgtcaacgccgagaaatttatgggcattgtccgcaagcaccttgcctttgaagaactgacccccactctcttgcgggaaatgatcgagaaaattgtggtgcatgagtgcagctatgatgagaacggcacccgcaggcaggacattgagatttattacagctttgtcggcaagattgacttgcccgaataaccgcccgacctatccgacacaatggccaagtgtcggataggaacggcaaaattttttgcacttctattgcttctttatcacacataagcaaatactcccggtaataagcgactgcctcctgttcttcatatttataatcagctgcttcacttttctggcagacaataagtgcatctatgatatagctcacatcgctcagtccagttggttttttctcacggataattctctccagatactctccctcaggtgttatcagataatcctttgtatcgttttccagtgtctctaccagccggtacttgcgaaatgcttcaccatacaatgtattgtgctttttcatataagtacagattccgctgtagtcctgctgctgatacatcttctccagcttttcgagtactgcctgctctctgttatccgaagcaaccgtatgaatacgcatggccacatatataccggcactaatcaaaagtcccgccacaatcacagtaatcagaaccttcgccgccatagacatccctgctttcgccacccgctggggcttctcctcccactgctgcttctctctttttaagtcattgatcgtatcctcgtgcacctgcacagatttttcaaagttgtcgccaccacagtacgggcagcgcggtgcatcgtctgcatatgacgcaccgcagttattacatacaatcatcctttctccctccggtgtctcacagaactcctcttcaagtaacaccctgtattgctctttgtctattatatcagttttttgctgtataggaagcattttcctatgagccgaaaaagaggggcagtcgcttgaaacgggcagccccttttgccgtgagaaggaataggaaaagaagcacatcctaccgatttctgatggaaatgcagatggaatattcgtttgagaaaaatgtgagcatttcttccggctgaatgtttgcatcggattccgtgtctcttccacgcttggacaatccggcgggtgcatgtccgacacaccggagacaatgggcggactttctggtgtccctaatggcacctcttcacagacaatataaannnnnnnnnncctcagacagcggcttcgcgcggttatgttttgttcagaggtgtgccataagggacacgcacaaaagtcctacaaattgtctccgggatgcggacatgacccgcggagtgctccaaacttggaaagacacggatcatcgaagatgcaaacattcggctggttagaaattccacattttttgaaccgaatttccagatgcattccatcagaaatcgaagaggatgtctttcttatatattacttctcacgacaaaagggaccatccgcttcaagcgacagtccctctttttcgttcataggttctataatttttatttctactccgtctttagtgcgcgcatggaatttaagatcgcaatgacagatactccgacatctgcaaacactgcttcccacatgttcgccacaccaaatgcaccgagaaccagcacgatcgctttgaccgccagtgcaaagacgatgttctgctttacaatgccgagtgtctttctggaaatccgcacgatcgacgcaatcttccgaatgtcgtcgtccatcagaaccacatctgccgcctcaatcgccgcgtcagatcccatgcttcccatcgcaataccgatgtccgctctggtgagcaccggcgcatcgttgataccgtcgccgacaaacgccagcttttctttcccattcacttcttttaacagacgctccacctgtgacaccttatcctgcgggagcagttctgcatgcacctcgtcgatgccgagttccgcagcgattccctctgccgcttcttttctgtcgccggtcagcatgacacatttcttcacgcccactttcttcatggaggcgatcgcctcttttgctccgtcctttaccgtatcggcaatcacaatgcttccgaggaattttccttctcctgccacatagacaacggttccgatgctcttgcacggctcatagaaaattgctttttctttcatcagcttctcattgccgatgagcacatttcttccgtcgattctgacactgattccgtgtccagccacttcctcggcgtctgtgatacggttcatgtcaagttcttttccataggcttcccggatggatgccgcaatcggatgattcgagtacccctcgccgagcgccgcaatctctaaaagttcctctttgcttccctcagccggcagaatctcagaaaccttgaattcgcccttcgtcagcgtacccgtcttgtcaaagacaatcgttgtcatctcagctacagcttcaagataattgcttccttttacaagtacgcccaccttcgacgccgcgccgattccgccaaagaatcccagcggcacagagatcacaagcgcacacgggcaggagataacaaggaaaatgcaggctctctgaatccagtcgctccatcctccgccgagaatgagcggcggcagaattgccagaattaccgcaccgattgtgacaaccggcgtatagtattttgcaaaacgcgtgataaagttttccacgcgcgcttttttgctgctcgcgttttccacaagttccagaatctttgcaacggtggagtcatcgaactccttggtcgtctgtactttcagcgtaccgcttccgttgacacagccgctgatgatctcatctccggctgccgccttgcgcggaaccgattctccggtcagcgccgctgtatcaatgaaggactccccttccagcacaatgccgtccagcggaatacgctcgcccggttttaccacgatcacgctgccgacttccacatcatccggatcgacctgcgtcagttttccgtccacctcgatattggcatactccgggcagatatccatcatcgccgagatcgactgtctggacttgccgaccgcatagccctggaacagctcaccaacctggtaaaacagcataacggcaaccgcttccgagtattccttcacgccaaatgcgccaaacgtcgccaccatcatcaggaagttttcatcaaacacctgtccgtggctgatatttctcaccgctttatatacaatgtcatatccgatgaccaggtaaggcaccagatagatgacaaataatatccatgtattgattccttccaatgcccccgtatgctccgccaccatcagggctgcgaacaggacaaaggatatgatgatccgaaccagcatccgtttctgtttcttcgtcataccacacacctcgcttttcattttcataaacgcataaacattcgtttatatgttcctctttttctaagcctgcgcaccctccggcacacaggctttcatggaattatctttcgttctctgtcgggcacacgcccatgttgttacattaagatcttgcagtccggctctacctttgcgcagacagaaacgacttctttcatgatgtcgtcgaacttgtcatcctctgcatctaccgtcatcttctgtgtcatgaagctgacatttgcatcattgacgcccggaatcttcttgattgcctcttccatttttgctgcgcagtttgcacaatccagatcctctaatttgaattttttcttcataaccttatacttcctttctttttctttcttattcctaatatgttttcctgttgtacatatcctgttctttgcatcacataccgttcgctactcctcgatatgctctctgccctgggcgatgatcgtcctcacatgcccgtccgccagtgaatagaacacggactttccttctcttctgctgcgcaccagcttcgcctgctttaaaatcttaagctgatgtgagatggccggctgcgtcatgtgcagtgcttctgccagatcgcacacacacacctccgcttcaaacagcacgaacagaattcttattcttgtagaatccccaaaaaccttgaacagttctgccagatcatataattcctcttcctcaggcatctgatcgctcacgatcttcagacgatcttgatggatctccacatcctcacaacattccagttctgcttcagacaacttctcaccctccttctttcaaacatatgagcaactgtttatatgtttataatatgctctgccatacactttgtcaagtatcatttttacaacttctggaaaaattcaaataaaagaaggctgtcggcaaacgacctcgattcgtctgccggacagcctccttagcaatgtgtatgctttgtatgtggttggctagttagttttatctaactgcatttactatagcacaatccatcttccatggcaatactgtttattgaaaagtattctcattttctaattcttcttagcttctgctttcgccagaaaacgctcattatcaatgatgaatctctcatgtgttccctcgccgatcacgccggctgcatcgtatgcttttacctcaaatacaaggcgctttctgtccacctcaaccagctttgtctcgcaggtaacgtccatgccgaccggtgtggctgccacatgcttcacattgattaacgttccgaccgtaccggcgccctcgtccagcttggcctcaacactctttgacgccgtattctccatcagggcgatcattgcaggtgttgcaaataccggaagcgtaccgcttcccatcgcctgtgctgtcttttcctctgtcactgtaattgtctgttttcctgtaattccaatctgcattgtttgtcaatcctcgctttctccgtatactacagaaggaatcctgccggattccttctcttactgctactatagcattttatatgctgtttgtccatttataatccgtagctggcaaccatattcgcaaattcctgtgagtttgcaaagccccagaatacggtctctctggagctaccgttgttcagctggttcacccagtcattcagaccggcgtcgtcatacgaacgtccgaaaataccgcggtagagcatcttgacataatcgctgttcgagaggttcatgttgatgcactcctgtgaaaatacaaaaccgtatgccacattttccattccgtatccgctgttgatgcgtccgctccagtcatttaagccgtccacatcataggtacgtcccagaaactcggtgtaatttcttgccacaaagcgtgtcacattgtaattctgatcccggctctcggtcaaggtgacggttcctctctgaatctcataggtattgcagagatttccaaactctacagaatccgtgaactgctggaacacatacagtctggatacaccgttgccaaggcgtgtcacccagtccgcttttccaccctcatccgacgcacgtcccatcaggctcaagtacagatgttccacataatccgcatcgctgtaattcttgttctggaattcctcgctgaacaaaaatccgtatgccacttccgctcctgttctgccgttggtcaattcctgtgcccagtagtccagttcgctctgtgacgccgttctgccaagcgcattctcatataaaagcgatgcaaaatgctgctttcctgtcaacgctgttcccgtgtcgccgctgtttccgccattgttgctgtcgtttcctgtattgccgccggtattgccactatccgttccgccgttgttgccactatccgttccgccgttgttgccactatccgggttctgtgaaccgttttctacagtaatctccatgttctgtgagatggtaatcggccagcttgtaatctccttccggctgccggtgccatccgtgtaataataccggtagccgcaattatctcccggctctttccagaccggtctccgcagagttcccatcgtataagtcttataactggaatttgcaccgggtccataatacgtaaccgtatatggagtaccgaggctcacaaatgttccgctcgcaccatttgagagcagcttatccgctaccgcatggttctccgttgtctcatatccatataccttttttgcccgtgtttctgtataagaactattgtccacaatagataatgacggggacaaatatacctcttccagattacagcaggcctgaatccagcttgattccagcgtctgaacgctgtccggcattacaagttttttcaaattattttttaactcaatagcatacgtctctatcgttatggttccgtctaaaatggtgtactctgcatcctctccataataatacagcagagtctcacatccccgatgaatttgattcccatttgccgggtaaaatacggactgattatgcttatagagtccgccttttccatcaatgtaaaaagtcgtattctgtggtgaaactgttatgctgctgatatccgtatttaaaaatgttccggacatcagtgtctcaagagctgccggaatataaaaagatgtcagtgctgtaccagaaaaagcatattgtcctacagacttgcactgttccggaagtgttatatcacttaaattggaacaattcatgaatgaccagtaaccaacctcttttaacgagtctggaagtacaaccttctgaagcgacgtattgctgtccatggaacagtcttccaatttggtcactccattcggaaccgtaaatgtcgatgctgtcttttttgacggatattttaccagagtcgtcatatttttattatacagtacgccatccacatccttataggactggttggcactgtcaacataaatcccctccatttcgcatacgtcttcaccgtctttaaatacattaagagatgccggcagccagagtttcttcagcgtcgacatactaaatgcctgctgaccaatcgactggataccttcgcttaccgtcacttcctccaacactttgttattataaaatgctgaactgccaataccggaaacgctcttcccatcaatcgtcgccggtaccgttaccttcttttccgttccggagtagccggtaatggtaagtgttccatcactttttgtctcataggaccatccatctgccgtctgtgcccctgcgccacgcacttcctcctgtgcgtatgcggtctgaatgtcagcgcccagcgttgcaaaaccaagcgccatgcataccgtgactactcctgccatacgccatattctcttcataaccttttctcctttgcatgttcgtacatatttattcttttttcattgtagcatgttttccccccccatcgtaaactatgtgacttattttcttattataatgtctttctaataatgtctttctgcatcccatcatcttcctgcagatccatacagctttatgtatcccgctgcatttatttacagatgatctataactctgagttttcgggtctacagccggtaaaatacgccgtgagacccgttttccgaaatattttgatcattttctctacctgcaagaacatttccgggtctacagccgataaaatacgtcgtgagacccgaaattttacaatttccgggtctcacgacgcatttttttcttccagtgcccaaaaatcatagatttatcccttttttccctcttatcaatcggttttcgggtctcacgcatctatttctcctctgtagacccgcgcctgcctcctccatgctttcccataaacgttttctttaaaagaaaagatcccggaacacactgttgtatgccccgggatctatcttggcggatgactccgcattattcatatgacttcgccatgatacttctcacatgatgtccattcagatagccacatgccagaagtcctgactggatgatctgattccacttgctgctggagagctccacaatcgtgttgtcgtcaaattcgatcgtacatgcattttccatctcgcagccctgatcgcaggtaatgcggtacatattctttctgctgatggctccgatctcctctagcgtattcaccatgcggtagacggtcgccgtaccgatcttgtcatccaatctggatgccttgtagtagatttccttacagcaggagcaatcctcctccagtataatatccagaagcatcaggcgctgtttggtaatgcggcagccgcgctcttttaacttctgtatgatattttccttctgcatctgggttctcagatatcttctgtcctgttccacttaagaacaatgtcctccgcagtttttacaatcgccgccgcactgcagggattttccgttctttttgtcatgaatcatgctgcgcacgatcaggcacacaacgattaccaaaattgctcctacaacaaatgttcccatatcgatcccccgctttctgccgaattactttgcctttacagcactctttacgtttacgttcaaagtctcgctctccttgtacggacggaacagcagataaatgaatccgatcacacaaaggaatgctacgactgtaccgaatccaaaatgtccggttgtgatcagtgtaccaatctggtagatgcacatggaaacaatgtaagccagaccacactgatatccgattgcaaaccagaaccactttgtattgttcatctctctcttgattgctcccatagctgcgaagcacggtgcgcataagaggttaaataccagatagccgtatgctgcgattggtgtcataacgcttgccaggttaccccagaactctgcaccatcttctgccacttccgcgaaaccgaacagcataccgaatgttgcaacgacgttttcttttgcgatcagaccgctgactgctgcaactgccatcttccagccgttgccgccctgtgtccatccaagcggtgtgaagatccatgcgattgcggaaccgatctttgcaagaatgcactcagcctgtgccgcctcaagtgctgcaccttccagatcgccgaaatcaagcattccgaaggatccgtctgcccatccgaagttcattaagaaccacaggatgatggtcgataatgtgatgatggtacccgccttcttgatgaaggaccatccacgctcccacatgctgcggagaacgttgccgacggtcggccagtggtatgccggaagctccataacgaacggtgccggatctcctgcaaacatctttgtcttctttaagataataccggagcatacgattgctgcaactcctacaaaatatgcgctccatgcaacccatcctgcattgtcgaagaatgcacctgcgatcaatgcgatgatcggaagctttgcaccacacggaataaaggtggttgtcataactgtcatcttacggtcacgatcattctcaatcgttctggaagccatgacacccggcacaccacatccgctaccgattaacatcgggatgaaagatttaccggagagaccgaacttacggaagatacggtccatgataaatgcaacacgtgccatatatccacaggactctaagaatgccaggaataagaaaagcacaagcatctgcggtacgaaaccaagtacggcgccgacaccggagataataccgtctacgataagacctgtcagccatgctgcacaacctgcattctcaagcagtgactgtgcgcccggaatgatccactcgccgaacagggtatcgttggtccagtcggtcaggatggctccgactgtagtaacagatacatagtaaactaagaacatgactacggcgaagatcgggattgcagcccagcggttggttactacacggtcgatcttatccgatgtggacagcttctggctgttcttcggctttgtcacgcactcgccgatgatggaagaaatatatacataacgctcattggtaatgatactctcggtatcatcatcaaatgcatcctccagcttcttgatctcgtaagacacatccggaatgctcttcatctgctcgccgatcttgtcatcgcgctctaagagcttgatcgcgaagaatctcttctgtgcctcatctacacttgatccaagctttgcttccacttcatggatcacatcttcaacctctttcgagaattcatgtaccggagttaccgcacccttctgctgtgcaagtgccactgccttttctgcggcctttgtgatgccggttcccttcaatgcggagatctcaacaacctcgcatccgagcttctggctgagcttgtcgatatgtaccttctcaccggtcttctctaagatatcaaccatgttgactgccatgataaccggaataccaagctccatgatctgtgtggagaggtaaaggttacgctcgatgttcgtgccatccacgatattgatgatcgcatccgggcgctcaccgatcaggtaatttcttgctaccacttcctccagtgtatacggagataaggaatagatacccggtaagtccatgatggtgacatccttatgtcccttcagcttaccttccttcttctcgactgtaacacccggccagttacctacgaactggttggaacccgtaagcgcgttaaacagtgttgtcttaccgcagttcgggttacctgctaatgcaattttaactgccattttctgctcctcttttcccgcagcgatttgtctgcgttatctttcttttatcattttctccgattttgattagtccgtgctaacctatcatcaaaaaaaattactcgacttcgatcatttccgcatcagccttacgcagggacaactcatatcctctgaccgtgacctctaccggatctccaagcggtgcaacctttcttacatagatatccacacccttagtgatacccatatccatgatacgtctcttgaccggaccctctcctgtcagcttcttcaccttgacagtctgcccgcaggcaacttcctttaatgtcttcatactctgctccttctctgtatagttcatcatagcattgcctatgtctataccataatcttgttcgccatatcttttccaatggcaaccctggaatccttgacattgacgatcatgttgccgcctgtctgggaaatgactgtcaccgtaccaccggtcacgaacccgagattctccaaaaactttctggtttcttccttaccgccgacttttttgatgatattcggctctccctcttttaccatagataacggcatcatttcatcctcttccttcgttcttgttgttgataatcattttcacttctattgcattggttagtataatctaacgttagttagttgtcaataacattgttgaaaaattttatcaataattatggtattggaaatctttgttagatcttacatttttttattcttttgaaagcgggactgtatatcattttactatatttatctttattacgaaaaaaacgcttaggctgtgaatcctaagcgtttttttcgtattcgtaaattattttaaatctcacttccatttgtttcaatcacatgcttataccaatagaagctatccttcttgtaacgattataagtaccttttccatagtcgtccgcatctacatatacaaatccatatcgttttgtcatctcagaagttgtggaacttacgagatcaatccatccccaataagtaacaccaaatacatccacaccatcctttatggcttcttttatctgctttaaatgcgcctctacaaattcgatacgtccctgatcgtgaatctgatgattgctgtccatactttcatacataccgatcccgaactcagctataaatatcggaagtccatagcgggtataaagctgatttaatgcaattctcagtccaaccggatcaatggaccagccccagtctgtcatcttcagataaggattattccggctctgatcaggaagcagccccgtaaatttcataggttcgccctgatactcagaaatattggacatataataactgaatgacaggaaatccgcttttcctttcttcaatgtctcaatatcttccggcgagtagtttctttttatgtttttctgctcaaaataccggtccagataatacggaaccacacccttgcattgaatatcatagaaataatagttgaggttcatatcaaatatctgctgcagagtatcttccggtctcacagttttcggatagtacacatgcttccataccatatttcccgcaagagcttcaggcgcaatctcatgtacaagaatcactgctttcgcactggccagaagcatattatgtacaacctcaaacgtaagctgttcttcgtctaatccttttaacgaatgatcgcgcatagctcccgagcaggtagaaagactctgaagactcatattgatttcattaaacgtcaaccagtattttacttttttatgatatctttctacgatagtccggacatatttttcaaacaaagcaatcgtttctcttgactcaaagccattcagcttttcacagactgccagcgggaaatcataatgtaacatagtgaccaacggttcaataccatatttgtgacactcatcaaaaaccttgtcatagaatgccagtccctcttcgttaggtttttcttcaaatcccgtcgggaaaatccgtgaccacgatatggacatacgaaacactgaaaatcccatttccgccatcaatgcaatatcttctttataatgatggtaaaaatcatttccccatcttttcggaaatatataggtatcttcatgtgcttttgcctcttgcagagatgcgtaggtctgctcaaaggtagcctcatccgcccgccgctcatttggtgctacatacttcaggaaatcggtatttgcaagccctctgccgccttcattataggcgccctcgatctgattggctgccgtcgctcctccccaaaggaaaccctttttgaaacttttctctcccatgttacttttccccctttttcatatttttcaggcactgatacagaatagaaatcatatactgttcgctttcaaccgtcatcagtgtatcctgtgcatgggaaaataacaccgtcataggaacgctgtctccctctgcttcattctggaggacagatgtctgcgccttatgcgcctctaccaattccgcagaagctttctttagaagctcctccactccgtccaaatccagagccgataatttggttcctgctttcctaatataatcccgggcatctcccgcatgcataatgacattcatcgctacctgaactaatttttcgctatccatttttctcctcttttcttaaagtatttacttcctgttcactctccagttcctgtttttcataaactttgaaaaacggaagatatatcaaataagtcagtacaaataaaaccgcccaaagaataataccacgaaaatcgctgtttaccataaaggtggaaataggctgtggcaggaagttcatcatcatggcaactgccggaatagacaccagtcccagtttaaatacaatataggtaatcgtaggaacaacaaaggatactgtcatatatccaagcatcataaccggatttaaaacaaccggcagaccatacataaccggctcgttgatattaaaaatagaagaagcaatcgccgcttttccaatggtactaattttctttgacctggaacggatcatcaaaatgttcagtggaagtgtacatcccaatcctcccagacaacaccagcccatgaaaaccaattcatcggtagcaatatagatcggagcctggcctgctgccacagcagccgcatttgctgcaatattagtcagatacaacgcacatacgatgggccaaaccgtccacgccgagagtccacagcaataacacaatgccataatcatatagaaaagcaggaatcccagataagtatttccgattgccgcaagcggactgaacactttttccaacagtgaaaataaatccacgttctgtccaatgatgatacatactaaaatcaaaacaaaaatgatcaggatagactcaaaccatacaaccactaccgacggaagagaactgtccttcttaaacagaccatgtttaaagtaagcagaaaacagccagccaatcaccagccccatgaccattgctactgtcatgcctcccgtcccaacatagccggagtttattacgagatttccatccacatactgaggatttgccaatgcaatcaatgcagatacagacgcaaatcccgttatcattttttgcttctggagcttcttgctttccataatcgtgtaaggaatcaaaaacgccataaaaatggaaatcagcccaaaggaaaaagaattgatcaggctcagatccggaagccatggagcaaagttccgaaacgtattaaccagacttgccaatgaaccaaccataatcataggcagaattatcgtaaaacacacctgaagcgcatgcatatacgggttctgcataaacttctgcattttctgtgaaaatggacctgccagccaatcctgtaatttcatataaaatttcatatgtactcctccttctcaaatcagatttttcgcaagctcgaaacattttgttccatccagtgtggaaaatgcataattgtcaatgatcgcatattttttcccatgttcctcacaggtttcacgaatcatctcctcattacatttcatctgaggcgctgccagtaccacatcaaagtcatcaatgacctccggcagttctgtataactgtaggcttccgtgtctacatcatacccctgggcttttcctgcttttcctgtccgcgatgcaatcattccgctggatacgccgtttccacaaataaataaaatcctcattacattatccccttcctctgttatatttttgatgaattcattatccattattttcaaacttatatctatcctccgagcttcctacccactaggaaaggaatggattgatatagataatctcttatattataataaataagattaaatttataaaatacaaaaagctgctggttttataatatattggcacctttcacagaaaggcagattataataatgaataaccttcaaaagctgcttacagttttaaaacaatcagatacaccgctttcgtcacggcaattgagctctttgctttctgtttccgaccgttccgtccgtaactatatcaaggaactcagaaacgccggtgaacaaattaccgcaaatgaaaacggctatctctggatcggaataaagaacgatgagcctgacagccctggtaacaaatcgcaggctttatttgcattcgccactccggaggagcgtattaattacattattgaaaagctaatactggccaaatccggccttgatttatacgatctggctgactctatttacatcagctattccaccattgaaaaagatatgatccgggtaaaaaagaaactcgcccttttcaatctgagtattcaccgccaaaacggaacaatcgatattgtcggtgaagaacatcataaacgagctctcttttcccattatcttacctcgaatctggattctaccatagatctgactttggagtcattctgtaagcttttgaatatttctccagattctttgcgggcaattgtccatgaagccttgcagaccgaaaacctttatgcctccgattacgctttcaaaagcattatcattcatgtcattatcaatatgacccgtatcaaaatcagggaatgtctattggaaaagccactttacgacagcgtgacaattcacactgccgaatatcgtgccgccagccggatctttgaccagatctcgcgcttatgccccatacagtttaacgaaaatgaactgcagcagctggcattcattatcatgacaaaaacaagtgcaatcaacgtcaataatgtcattgacctgccccggattgtggacagcgcacttattcagtttgtcaatgaaattataaaacaggtaaaaaccatttactatattgatttatatgacacggattttattaattttttcactgtccatctctccaatgcactatttcgatgcaggcacaatgtttccatccggactcccttgtcagatgagatttttattcagaatccgttaatttacgaaatcgccgtttttattgcacaagaaattaaaactacttttggttatgagttaaataaagatgagataacttttatatctcttcatgtaggtgctgttcttggaaaaaaaatggatgaacatcccgaaataaaggcagttctggtagtaaataattattataactattacaataagcattctctggaatccattactcaaaaattatccggaaaatgcaaaattgcggaggttactaacactctggatgacgttaatcctgcttactacgatctgattatcgatgccacgaatcaggttctgccacaggccaatctcagagtcatacaaacaaatacaattattacagagcatgattttaaaaaaatacaatctgtctgtaacgaacttctggctgaaaaaaaacgcagaatattccacgataaactaattagttttatggatccgcaattatttgaaaaaaatcattatgaaaattctgtggaagatatgatacgctatatggcagaaaaactggttgctctgggtattgctccggaagcttttactgactctgttctggaacgggaggcagttacccccaccagttttgacaacaaagtggcaatcccacattccatcgtctgctctacccaaaaaaatattggatttgtaatcgttaacgaaaaacctcttcgctggggaacctttgatgttcaaattattatgatgatcggcgtcaaccatcagcagcgtatggattttaaatatgtctattctaatttactggagcattttgagaacagcactaccgtagaaaagcttatccacgcatcagattttcacaattttattgacatactgacctcctgatcctaatttttatctgttctctaatctggaaataaacagactgccaaacatatatttctcagtcaaaaaaataaagtgtgtaagttttgttaacaccaacaacttacacactttattttatgttcttagcaaactccgcccttccgggacggagtttttcatttcagatctctgttttatttctcagcacgtgcgattgcaaccttgaaatccttggtatctgcaaagatctcgttcttgtacggattcttcttctgctcgattgcgcgcttgatgattacgcttaagcagatgacatttgcaaccaatgcaatgattgccatgaatccctgtaccttggtgttcggtgctacgctggtcagatccattgtcgttaaggaaaacgcatccagagactcaaagccctctacgttagagtagagtaccggaagtacagagaaacgtcccttgatctggaacatcggaaccacctgtgcgaacatacaccaggttgccagcgtattggcacggttctgaatccagccgcccttgttccaaagtgcatttgcgaatgtcggcgcaagaagcagagccagaccgcaataccaggaatgcgtcggcaggttattgtatgtataggtaaagttccaaagatcatatgccacgataaaccataccgtcatatccggccataacatatcctgatgattcttgtccttggatgcataaattccccaccagcctgtcatacagaagatgttgaggatacctgcgataccattgacccagttccaccagccaccgttcagccatacatcctcgatggaataccaccagccattgactgcctgggcgcctttgattgcggactcaaaatcagaagcaactgcgatcatgatgttgattgcaacgattacaaacggccaaaccttgaaccaatcggtcttaccgatccactgcttgtactttaagaacatgaaaccgatgcatccaaatgctgctgcatataactttgcataatggaaccagccacccatatatacataggtatcattggttgcaccccagccaccatttacggcgctgatctgaatagcgataaagtatacagtaagaattgcaagaactcctacgaaaataccataaccgccaagttttgtgcggcgctcaatctcatttaagattacaagtcctgcaaatacgagaacccatcccaggagctgccacatgctgttaatctggaataacataactttttcctcctttgtcttattaaaaatatgatactccctcgaaccgtcatgccaggtatctggtatgaccagtccacaaatgaattttaatactttttttagaaaattacaagtatttttacaattattaacaaaatctggtatgaccactgttcagaattgcctgttatcccctgccggcacgcattttctgccggttcatgctatcttacgccttctcatccaccttgattcccttcagatccgcttcaagcactttcatgctgctcttgatgtcgcccaggttctgatccacactcttcttcagatctgcgctgtccgccagatccaccatgtccgtcatctgaatgtccgggctgtcattctggcgcttgatgcgctccgcctcttccactgcttcatcggttccctcgatcatcgcgcgctcaatcgcgcgctccagcttcatctcatccagcttttcctcgcgcttttccttctccttcatggcttcgtcggctttttccttcgcctcgtccatcttctcatcctgctggtcttttacctcctgcacaagcattccgataatctcgtcgtttgccgcatccatgatgtcatccgcagctccctgtgcgtcaaccatcgcatgcgtcttcaagcgctccagcttgatacgggagacgttctgtttctccgcagtcatgccgtagtcggctctccggatctccctcttgtgacccgccgcataattgttcagctccagcgcctgcttctgatacccggtcagcggctttttgtggatctccgccagtctgtcatattcttcgtccgtcagcccttcatccagaacgccgttcttataatcctgttctttttccagaaggagcagatcctgctgttcctgggaatccgcatccacgccgcactgctcccgcaatgcttccttctgctgattcgtctcatcgattgcagccagtgctccctttttgcggttctccagctccgcgtagctgtcccggtggctctgtatggtatcatccaccgaccggtcatttttccacgcattttccacgaccttccacgcctgcttcctcgcttcctccctgcgctttgccactggatcttccccgagctttgtcgcgccgccgaacgctgcgttttttactgtccgtacgctctgtccatcctttgttcccatctggacactgttgttaaaacctgccgcattgactgtcagtttcatactcattttccccccgtatcaaaccagaatacgtctccgtgtgttactgctgctcctccgtctgtgtcagcgcgatcagctcctgtgagcgtccggcgatcgttaaaagatgctgcatattttcttgctccgccgcaagcgtctcgttcgcatgtgccgatacctcctccgacactgccgagatcgtctgcacggaatcagcaatctcctgatttgccgattcaagctgtgaaacgctctccgtcagtctcgtcacattatcgcggatcgcataggtatgttcctcaatcgtaccaaagctttgcgatgcattttcggacatttccttttcgtcgttgattccgtcaatcatctcacggatgactgtcacaacctccgtgatggaaccggacacattgccgatcagctgtgtgatgttggtcgttgcactcttggtctgggttgcaagctccgagatctcggatgccacgaccgcaaacccttttcctgcctctcctgcgcgtgccgcctcaatacttgcatttaacgccagcaggctggtctgggacgtcacaccgttgataagctctacaattgtattcatctcactgatatactgattcagcgtctcgagcttatccgcggcattggcgctgtttcgcacagatacttcaacctctcccaccagggtatccatatccgcttttcccttttccagcacagaaagcgtcttttccatgcgctcggtaatatccgatgcaactgtgctgacaagtcctactttctctccaatcgtctccgtctgtgccagctgtctctgcactgcctccgccgtgtccgtcgcgccgatggttacctgtcccatcgcgtcctttgtcgtctccgatgccgactgcagctgctccacttttgcatggatctcattgattccgcgtctcatcacatccgcattccgggagacatccccgagaaccttttcggtctcgccctgcgcatcctttacctgctgcagcttctccctgctgttcgtctcggaagtcgccgctgcgatataggaatacgcgcagaacaaaagtaccgccagaatctggatcatgccggaactcatatcacggaaaccgaatctgccggttgtcgctccaagaatcacaaccagaaggttctctatcacaaccccgatattgaccttgagggcatacgccttgtcattgtatacggaaatcacaacaatcatcggaaatacatacaaaaacagcatgttgtttgtcgtcgtaaacaaaatgaccgtgtacatcacagcgaatccctgcgccaccaggtgcttgatcgccgggctttccttgtccctgctccagaaaaaaagctccatcagaggcggtcccatcgccagcacaacaaccagcagagagtacagcagtcccctgctgcccaccagaagctgtgcgataaacgtaattgtaatcatcgacgcctccaccagatggcagatcatagccgtccggttgcagcgcgccatatcagataacgttcttttgtccatttgtcattcctccgtacaccttgacaccattcttttactctaaagtatcatttttttcgccctgtcgcaatatttgcaataaaaactcgtccaatttttaacattttttgaaaattggacaaatccaactttcttttctgtcacatgcggacgcgctcacgcagctgcagcagcagctttttttccaggcggcttacctgcacctgactcatcgacagcagttctgccacctcgcactgtgtctttccctcgtagtatctgagttgcagcagacggcgctcacgctcgccgacggtctccaacagctgttccaccagaatgtggtttaggaccgcctccttctccggctcctcccgctccgcgctctgccctccgcttccctccatctgatcgatcagcagcagctcctccccgtcgcgctcatagaccggctggtagatggatgccacctcccggtttgcctcaagcgccagcacgatctcctcgcgctccagcccggcggcttccgccagttcctccatcgtcggctctctccccagttccctggtaagcatttctcccgctctgcggattttatagccgttctcctttaaggttctgctgacttttaccataccgtcatcccgcagaaaacgcctgatctccccggtaatcatcggtaccgcgtaggtggaaaaagcaagctgcagcgatacgtcaaatttgtcgatagccttcatcagcccgatgcagccgatctggaacagttcctccctgtcatgtcctctgtgttcaaaacgcctcgtcaccgcgtgcaccagtcccaagttttctgccaccagccggttccttgcgtccttgtcccccgcgtgagcctgtctgatctgttccgtccaaagttccataacgttcagccttcctgcacgccaatgtattttttcatgcgcacgctggttccttttccgggcgcagactgaacatgaacttcatccataaacgcttccatgaacgcaaatcccatcccggagcgctccagttccggctttgtggtgtagaacggttccattgcctgcgccacatcctcaatccccctgcccgtatcacagacgatgatctccacttcccgtcccatgatcctgcatgtcatatgtaccttttcctccggattgtcatacccgtgaatgattgcattggtcaccgcctccgacacggccgtcttgacatccgagagttcatccatcgtcggattcagttctgtgataaatgcagccaccgccattctggcaaatccctcattgacggaacgcgcatcaaaacttaattccacttcattcttactatgcattgtgcttctccccttcccgctctttctgctgcttaggtacgcttgtccgtatcagcgtgtgaagtccggacaccttaaaaatcttaagaattctgccgcttaaatgttccgcatacacctcaccgccaaaatatcccatcttccggctccgcccgataatcaccccgattccggagctgtccatgaactccgttcccgcaaaatcaaacacgagcgtcttcacctgaccggtctcaataaagaaatccgcctcctgtttcaggcggtctgcctcatgatgatcgagttccctcgggacatacacccgcaggcagcttttttcctgttcgcaatatctttccatcctttttcctccctttcttttctttatggcatttttgtataataggaacaaagtttcctatgaaacaaaaaagacgccggtacggactgctccgttcgacgtcttttgtatcataattcttttgtcttatcactgttgtatctgtttgcgcagtaccctgcttcttcctgtccccgcttattcttcggtgttcagatacctctgtgcattggcagcgcgctcggttcccggatacagatccgcaaacttctgataataggtcttggcattgtccatgtcgtcattcctgcggtaagactgcgcaaggtagtacagcgcattgccgttgtcgtaggtttcatcgagttcgatcaccttgaggtaatcctcgattgcctgtgtaaactcctgcgcattgtaagcatctgttgcttccttatatacggcgctgatatactccgcgtttacctgtgcattgatcgtatcgtacacagtcatggagtcatccgaaagataatcggtattgacgttgccgagtgccgtccccgccttctcgatgtcaccgtcggtgtacgccacatacgcctgcagaagctgctcgtaagtgttgacctttccggcgctgctctcctcctcgttcttcgcatccgtgatctgtgatgtgagatcttcgatctgcgcttctaaggaactgatgctctgattcttggatgccacggcattgttggcgtcaagaacctccgctttcgcctgattctggatctccctgcgcactcccggcacaatcagaaagcaggtgatcgccgcaccgattgcaattccgatcaccatattgatgatcgttccgattgcggaattgtccttgagatagcgcggctggatgatggtctcattgccgctctgataggagatcagatcctcgttcttctgctttttcgggttattctcacgcaatccggcgttgacttcttttaaatagcgcagcgtcgtggtgttgttggcgtcaatttttcccgcattccgaagcgacttcttggcaaggtcgtacttcttctcctgaatgtagaggagcgccagcagctgatgaccgcttaccagcttcggatttaaggacagcactttcttgagctggatgatcgccagatcccggctgtcctgtctgcagtacagcagcgcctggttatattttttgatcgtctggttgatcgtatccagccttgacggattgttctggatctcatttaaataccggcttgcggcgttgtccctcggctggtaattcttgctgatgacccactccgtcaacgcttcgaccacctcgcccgtctcgaagtagaccagtccgagcaggttgcgcgcatcgatattcatcttataaaaacgaaggctggtcctaagactctctatcgcgccggacaggtcccgcactgccgccttctctaacgcatcattatagtaggcattggacgccataatgatctttttgtatattttaacattggctccgcagttctggcagatatcgcccttgcccagcttcgccccgcaattataacattccatggaaaacctcactttatcaatcctgaccctgcctgcttctacatgccgcgcttcatatcctgcaggatctcctgcaatacgtccgtcatatccgtgagttcatgattatagatagcctgctccgcctcttccacttccaggctcggcttaaaattctttaattcttcttcaaaattgatcactgttatcacctctgtcatcaatataaaaacaccactatattattcactttctcattataatatagtggtgctaataatcaagctatttttgacgcagaaacttctgctattcgacaccggcgctgcacggtcttgttccgatcttgtccggtaatttgtaaaattccactccggttgccatatttttcaaggcaagcttcaactcgtccatattgatgatcacgccgggataaatctcctggatcaccgagacacatgcgcctctggaactctctgcgagaatacggagcttccgcacttcctcctcgtcgctggcaagcattgcagaatccttgatcttaatccgaagcagcgacgtccggcgcggatcgttcgtgtaactgacgccacgctccttggagagaatctcgaacttctccaatccttcctcgatcttcgccagttcctccctcgtcatctcgatcttcttctccatgacacgcaggcggctgtacacatcaattccggcaccgacaaagatctcggtgcgcttctcggcatcattgccaagcgaggttgcaatcagtccgcggatcgcctgtaccttaccgccgataatactgccctttcttccggtcagacgtatctgcccatggcagatcaccgaacaatccatcagcacatccgcctgcagatcaccctcacacagaatgttcgtgaactcaaaaaacttcgcagtaatcgcgcccttcgtcttcacggacgccttgttgccgccgagcataccacctcttaggatgatgtccttgccggcttccagcatgcacgcttcggcgacaccgtcgatcgtgattgatccggttgcccggatgctgacgccgctctccacattcccgtgaatgacaatatctccgcggaagtcgatattaccctctgccagctctgcattccccgagacttcatgtaccggaagaaccacaatccggtcattctgcatctcgatcttaccgtccatggaagccgtataagtcacctcatcgtccatacgatcgaaacctttgccctttaacggcatctgttctcttccgtgcttggcaggcaccagcccgcccttgaccgacattccatcctcgccagacacagcagggtgatacacggcaatcacctgaccggcagtcacagactcgatcgaatgtaccgaccagtaatccacagaaccgtccggcagaagcttcggcttgccgtcaaagttcgtgtcgaacttgtattcgtagtaaccgtccgttccatccaccggcttcttcccctgcgcgatcagaagctctgcattgtatgtatgcccctccagcatatcggaaatccgctgctcatctatgcctgtggtgattcctctcgctgccatctcctgccggatctgggagtccgtataccctgttccctgttccggctccgggagcagcatataggcctccatctcatcaaatgttatgcgtataataggtttctgttgtgtaagttccgccatagtccgccgctccccattctgtgtaaatcccacctgttactgtcaatccatctacattctatcatactagtccgatggtactttttcaagtacatctttttgcgtttccggtacaatacgcagggtttctctaactcttttctagcggttcatctgtgcgagccgttcctcgacctgtgccatcatctgctcgtagcccgcgagcttctctttttcctcctgaacctttgcctccggagccttgcttaagaatttttcattggaaagcattcctctggaacgggcgagttctttggtcagacgctctttttcttttaagaggcgttccttctccttctcaaaatcaaccagatcctcaagcggcagatacagtgttgctcccggaattacgacagataccgcatcgtcctcgattccgttcttgtctgcctgtacactcacatcgcttgcgcctgccagattctgatatgcctctcttgtcttctcaaatgtctcacgcagtgcggcatcgtctgccacaatgaaaatctttgcttttcttgaaggcggcacatccatctccgtacgcacgttgcggacaccttttaccagatccttgcagtgctctaacatctcttcctctgccgggaaattccagtctgcgcggtactccggccattttgccagcatgatcgtctcctctttgggatgcagtgtgcagaaaatctcctccgtgataaacggcataaacggatgcagcagctttaacgcctctgtgagcaccgtctttaatgtccagaacgccgcatttgctgaaaccggatcctgctctttgttgtaggtgcgcgtcttggtaatctcaatgtaccagtcacagaactcatcccagatgaagtcgtaaaccttctgcactgcgattcccatctcgtacttgtccatgttctcggtcacgtccttggcaagtgtattcacctttgagagaatccacttgtccgccggctgtaactcatccgcggacggctcggttatcgcagccccctccagattcatcatgataaaacgggatgcattccagactttgttggcaaagtttctggatgactcgactctctcccagtagaaacgcatgtcattgcccggcgcatttccggtaattaacgtcagacggagcgcatctgcaccgtacttgtcgatgacctcaagcggatcaataccgttgccgagcgatttgctcatcttgcgtccctgggaatcgcgcaccagtccgtggaacagtaccgtgtggaacggcgcttttcccatctgctcgtaacccgagaagatcatgcggatgacccagaagaaaataatgtcgtaacctgttaccagcacatcggtcgggaagaagtagtccagatcctcagtcttcttgggccagcccagtgtcgagaacggccacagtgcggaggagaaccaggtatcgagcgtatccggatcctgctccatgtgaccgcatccgcacttcgggcacttctggggcgcactctttgccacaaccatctcaccacagtccggacagtagtaagccgggatgcggtgtccccaccagagctgtctggagatgcaccagtcgcggatgttgtccgtccagttaaaataggtcttctccatgcgcttcggcagcagctggatatctccattcttcactgcctccactgccggtttgatcagctcatccatctttacaaaccactgctgcttcaccatcggctctaccgtcgtaccgcagcggtcgtgtgttcctacattatgagagtgcggctccacctttaccagaagtccctgctccttcaagtcgtccaccagtgcctttctgcattcgtagcggtccatcccctcgtattttcctgcgaaatggttcatcgtcgcatcgtcgttaatgacggtgatctcctctaagttgtggcgctttccaacctcaaagtcgttcgggtcatgtgccggtgtaatcttcacgcagccggttccgaactccttgtcgacatatgggtctgcgatgaccggaatctcacggtctgtcatcggaagctttaacatttttccaacgatgtccttgtagcgctcatcgtccggattgacagcgactgcggtatcaccgaacagcgtctccggtctggttgttgcgatctcaacgaatctaccttcctcgccgactaccggatagttgatgtgccagaaaaatccgtcctgctcctcatgctctacctcggcatcggaaatggaggtcttgcagaccgggcaccagttgacaatgcgggagcccttgtagatcagtcctttttcatataacttcacaaatacctcaagcactgcgtcagagcagcccttgtccatggtaaaacgctctctctgccagtctgcggaggaacccatcttctttaactggttgatgatgcggctgccgtactcgtccttccactcatagcatttctcgagaaacccttcgcgtcccagatcgtgcttgtcaattccctgctttttcaggttctcaatgacctttacctcggtcgcaatggaggcgtggtcggttcccggctgccacagtgcattataaccctgcattctcttataacggatcaaaatatcctgcatggtgttgtcgagcgcatgtcccatatgaagctgtccggtaatatttggcggaggcatcacgatggtaaacggtttcttactgcggtccacttccgcatggaaatagccgttgtcctcccattttttgtaaagtcttccctcgatccccttcggatcatatgtcttggcaagttctttgctgcaattctggcacattgtcctctctccttttctttcctaattacataaaaacgccctttgtatccgtaaggatacaaagggcgacttatcgcggtaccacctttgttcaccagctgtatacagccggtcttcgctccggtcagatgctctctaaccagcggttcgttaacgggaaccgggcgtgaacacttgctgccgtacatcttctgtaccgctttctgggtgttccggttcaaaagctaccttccacgcatctccttccaagaaaccttgcagccgatgggtctctctctctgcggcgagtctgcatgtactcctctttctctctaccttttacatactgttaatgatacgtgcagcgtcccgttttgtcaagaaatttttagttcagactcttcaccagcgcctcatagacaaagcgcttcgcctcttccctgcttaccgccatcttctctcctttttccagatcgaccaggtatcctgcaaacgctgtcatctgcgccacgaacgccagcttctgcaagtacggattcgtctccccgatcgtgccttccgacacgccctggcacatcagggactccacaatcctatccgccagatggcagcccagagcctgctgtctcttttcacattccctgcgcatggactcagagacctcatacgaaccagttccgatccgtaccagaagacagaacgcctgtcgcttcgcgaacacctcttccatataagtaagaatctgtacaaattttcctgcaaaatctccctcgcctttggtgatttccagtacgtgcgcaagccgcatctccacatcgtagaggaccgcattcgcaatgatctcctccttggaggaaaaatactcgtacgctgttcctttgccaatccccgcctgtgccgtgatgtccgacaccttcatgcggttgatatcccagccatcggttaccatggcaagcaccgcctcgtacagcagccgcactttctccggcagtgccccgttttcatatctcccattcattataattcttcctccaccatatttttctccctgttgaacgcgtcatagatacacggaaccacaaacagggtcagaagcgtaccgtaaatcaggcctccctcggtcacaatcgccatcggctgcatcatttccgaaccgtcaccgagtccgagcgccatcgtggacatcgacaggatcgtcgtgagcgctgtcattaagatcgggcgcagacgcgtctttgctgaatttaagagcgcctcttttttcgtcatgccgcccctgcggagctggttgatgtaatccaccataacgataccgttgttgacgataattcctgcaagcatgacgaatccgatcattgcgacaacactgatctcatttccggtgaaaaacagggcaaacagacctccggtaaacgccagcggaatcgtgaacatgatgatgaacggagacaggaatgactggaactgtgccaccatgatcagatagataaatacgaccgccagaatcagcatcaggtacaactgctgcatggcatctgctatcatctcatcctcacccgtcatctcaattgagtatccttccggcagatctattttattcagttctttcatcagtgcgtttgcgacaagcgtgacgttgtgtgtgtcatccacacctgctgtgacgctgatatagcgcgtctgggaatccctggacactgcgtttaagctgctgccagcctcaaacgtcgcaatctcggtaagtggaatctcctttaccgtatccccagtatccccggtatcttctgtgtcttcgatatccttggcatcccctgtatccttggtatcctccgacagtttttcgtccgtctctttctcctcatcgctacctgtgccgcttagctgcgccatcttatcctcgtaggaaaacgtgagattcttaatatcgtcgagcgacacattcgcctgctcctcgctccttacatacacctcgtaatcctgcacgccggcagagatcgccgtcaccgcggtctgggacgccaattttgcatagaccagctggaatacctgcgctgttgtcatgccgtattccgctgccttttccttgtcgacatgaatcgtgtaggactgcgtcgtattatccagcccgtcatccacatccaccgttccttcctgtgcttccaccacaccggccactttccctgccagttcctggaggatgccaaggtcacttcccttgatctgcaccgtaataccgcttccgaggaaggaactcatatccgacgccgaattgtccgtgtcaacctgacagtccatatctttggtcagctccgcaatctgcgctgtaatctctcccgtcgtgacggaggaatcctcctccagaagcagatacatggtcacactgtcgctgctgcctcccatggacatcagagcgctgtctcctccggcgatcgctccgatcgtctccacgccatcaatgcctgcaattttctctgtcacctcatctgcgcgctcacagagctcctcaaacgtcagtttttcgtcgtctttcgccgccacagtcacggtcaactgatcggtttccatattcatatccatgaagaaaaatcctctggaatacgcggcaagcgcactcgtcacaagcaggacagtcacaccgatgaacacgaccggtttgaacctgagtgccagttccaaaagcttcgcatatccctgctgcactttttcaaagaaggcgtgccgcacctctttgggatttttaagtagtcccgccgccatcatcggcacgaacgtcagcgccacgatgaggctggctgtcaatgtaaacgtaattgtgagtgcgatgtccacaaacagctgcctcgtgattccctctgtgaacacaatcggaacgaacacacacaccgtcgttaaggtcgatgcaataatggctccggtcacgccgccggctccctcaaccgccgcctttttgatggaatatccctcgctccgcaggcgatagatgttctcaatgaccacgatagagttatccacaagcataccgatgccaagcgccagtcccgacaacgagataatgtttaaggaaatatttgaaaaatacatcaacaccaccgcaaaaataacactgagcgggatggagcatgcaatcacgagcgtcggccggatgtcttttaaaaacagaatcagcacgatgacggacagcagcgcgcccacgatcatattttccaataccgactgcacaatgatatcgatataaattccctgattcatcaagatcgccgtgtgaagtgcgggattatctgcctccatcgcctttaatttctgctggatccgctttgtcacatccccggtcgagtacccggtctgtttttcaatggaaagcatgattgcggggtttccgtttaccttggaataagactcaccggcgttgttcaccagttccactgccgccacatcgctaaggcagaccggcccgattccgtccagaccaagatcaatcaaaaccacctgctttaattcgtccacggaatccagcttatctcccacacgcaccatgtagcggttctcgccttccccgacatagcctgccggcatggaaaaattctgtgccgcgagcaggttaccgagcatgtcgaccgtgagaatctgattcagatccgcagattcctttgcgctatcctttgccgcatccagctggctctgtccctgcgccagctgattctttgcatcggcaagctgcgctgtcgcctcgctcagctgcaggattccctcaatctggttcttcgtcagctgcgcggaggcttcatccagcgcaattttacctgcgtccacctgtttttgcgcctcctgcatggtcgcaattcccgtattgatctcggcaagcttctgcgtcatatctgcgattgcatagggcagatcatcgagtgtctgtactttgatgccaaggctctccagctgctgtccccatgcggcgatcgattcattgattgttgcaagctgtgcatttgcctgctgctcgatctgtgcgctgcctcccgcaatcgcctcctgctgttccggtgtcagcatattcttcagcgcttccagctgctgtctggctgcaattccatcattataaagctgctgcagtgccggaattgccttctccatgatcttttttgcctcagtcatcatggtcatattcgtctttaattctgatgcgccgacatacgcctgaatctttccattttcaatctgattggctgcggcactgacctggtttgccagttcgctcttgccactctccagctttttctcgccattttccagctctgcggatgcatcatccagttccttctgcgcatctgcaaactgttcctcgatctttttctgaatcttctcattcagcgcgtcgattttgtcctgatccatggtcacctgcacggattcctcgagcactccggtagcacttaccgaagccacaccctccacgctctcgagtgccggtgaaaattcattttccacataggaagacacctctgactcatccatgccttccacgtccgccgacgccaccatgaccggcatcatatccgggtcgatctgcataatcatcggctttccgacgctgtctgaaaaacttccctccagctggtccagcttctgctggatctcaatcagaatggaatccatgttggcgctctgttcgtattccagaataaccatggaatagttgtcgtacgatacggagctcacgtttttgatgctggatgtcgtcgccatggaggcttcaaccggtgccgtcacatccgcctcaacctcctccgggctcgcgcccacatccgttgtaattaccagcgcatagggcaggttcatatccggcagcagatcagtcgtcattctggtaaatgacaccacgcccagaacgatcaccaggattacacccacaatgacagtgtacggtctttttacactaaattttgaaatcacatctgtatcctctctttgactttgtattccgtccgaccagtcggtcggtttttgacattttttatgttgcggagaatctttcgattctccgcaacatatctgcgtttgtctattctgctgtcttacgatgcttattcttcctcatcgtcgtcatccgcaattgccgccgctgttccggctaccgaagaagccaccacaaccacgaccacaattacaaccagcagcaataagatccccataaagatcaaaaaacccgtctctgtcattctccttctcctcgtctttctgtcagcagatgccgcacatcccgccgcacctcttccggcataatctcactcctgatgcaagtatagcatatttacacccgcatgaaaagtcctttatccggcctgttttgtgaagaacttctgtgtgaattccgccctgctgcaaggttttccgaacagaaacccctgtatataatccggctctgtctgttttgcctttgtaagttcgccctctgtctcgattccctcaacgcatacgtgaagccccaggctgtgggacatctccacgatatgatttaaaagccggtactcatattcacggttcagcgcttttaatgtgaacgaccggtcaatcttaatatatgcaggctttaaatcgcttaaacaacgcaggttggaatatcctgtgccaaaatcatccagtgccagcaatacaccgtattctttgagtccgttccagactttgtcaaagcgctcattctcctccagataaccgctctctgtcagctcgatgcagacactcgacggcttgactccgaactcatcaacaatcctgcgcacatccgtgagaacacggctctttaacacctgcacataggacaggttaacattcaccttgaactccggaagaatcttctgccattccctgcatgcatccagcgcctggcgcagcacccacctgccgaccggaataatcagaccggattcttcgagaatcgggataaattcgccgggcgataccatcccaccctccggtgaatggaagcggagcagcgtctccgccccggtcagttcaccgtttgcagcatttaccaacggctggaaatatgcctcaaatccctcaaatccattatttaccgcatgatgcagctgccgcagcagtgtgcggcttttcagataatcttcgtattcctcctcctcaaatacatagcagctgttttttccgcgctccttcgcctcgctgagtgcaaactccgaaagcttcatggcattttcaaaggaattgtccacatcgccgttcttcacgatacctccggacaccgtatacaccgctttgtactggttctgctcaataaatgcgtagatggatttcttgatctcatggaaaagatcttcggcctgctgcacactgccgccggaaaaatccacaactgcgaactcatccgccacaatatggaacaggctctgttccgggcctatattttcctcaatacactgtgccgttcttcttaaaatataatctccgtattcgttgccgtggctctcgttgatgttcttgaaatcatcgatgccgattctgagcaaaaatccctgtggcagctttggactgcggctctcataaaaaatcttcagactatattctcccaacaggccgctgacattgtccgccttctgttttgccccgatctcattgatgcagcccacaaggtatctgggtgatccatcctccggatcgctcaatactctgcccctgcagttgatccagatcgtttcatgattcttccccatccagcgatagtgcagattgtggaatactttcctgcccgtggagagaagctccagctctaccagcagcaaatcaagatcatccggatatacaacctgtctgtgcatttccactacattgtgaaaatgatctgccggcagacaaaaacgcttcaccgcattcggtgaaatctggtaataatcttccttaaaatcacacacatacaagtaatcatccatacaagggcttaaaagccctaccatatcaaccatttgttccgtcgtaaaatgcgccacttccgccttcatcttagcacccccacatcccgcatctatcgtactttagtcttactccatactacataattttctgaaaaaagtcaatcacagggcagaatatctgcacaacagataccgggatgttgacgatgtctccacaaaataaggctgtcacgcgaacggacggctatgtcatatattacactgaaaaaatcggaaaggacaacgttccagatcaaacccggagcgtggacattcggagcgcaaaatacggaatttctaattctgccgtgtttgccatctgcgatgatccgtgtctttccaagttttgaacactccacgaggagatgttcgcaagccgcagacaattttagaactttcgtgtgtgccttgtggcacgctaggaagttcgctcattgtctgcagtttgtcggacacctcctgtggattgtcaaaacgtggcaaagacacagaatgagatgaaaaacacggcagaaaagaatttcacgtattttgctccaacgaatgttcacgcccgggttcatccggaacttgagccttcccgtcttttaacagttgcagcttatcacaatgccatcgttccgtgtgactgccacattttttaacccttcacacttccgagggcaacgccctgcacgatgtgtttggagaggatcaggtatacgacgataaccgggaatatggagaacgcgatcatgacgtacacctgccccatatcgaacttcagccagtctgccgcacgaagctgcgcgatcaggattgggagggttttcttcttgtcatcgtgtaagatcaatgccggtgtaaagtaattgttccagctgcttacgaatgtgaagatggcctgaaccgcaatcgccggtttcatcagtggaagtacgatctgattaaaggtatggaactcgccggagccgtcgatacgcgccgcctcgatgagggacagcggcagggcgctttccatgtactgtttcatgtagaaaaatgtaaccggtgcagcgatcgtcggcacaatcagaggaataaaagaatcctccaggtgcatctttccgaccagctgtacaaatccgagtgccgttacctgtgtcgggatcatcatgatcatcaggatgaacggatagatgaactttttcagcccaaaatcatatgcgtggattgcgtaagccgtcatggtcgagaaataaacggaaaccagtgcgcttaagcctgctacgataatactgtttaacataccgttccataccggaagtgttcccgcgagcagattcttccagttctccagaagatgcgagctcggtgccagtgtgaatccggactgcagctgtccgtttgatctcgttgcattcacaaacaggatgtagaaccagaacagacagaaaaacgaaataatcgtcaataccacatatgcaatggctcttcttgtatgaatattcattcctttatgtacttctcttgtttccatacagctcacccctttctcttgtcattgccggtaatcttaaatactacaagacttaatacaccggtgatgaagaacaatacaactgacaacgcacccgccataccatagttcttactgtacagatgcttattcaagaacataatcagcgtcatggaggaacgcatcggatctccggttccatttgtcaaaatctgcggcacatcgaacagctgtaaaccgccgatgagagaagtaatcagcacatataccaaaatcgggcgcagcagcggcaacgtaatcttgaagaatacctgcatggaagtcgccccgtctacctcggcagcctcaaagagtgaggtatcgattcccatcattcctgccatgagaaggattgtcgtattgccgaaccacatcaggcaattcatgaatgcaaccagtcctcttgtgcttccaacattggaaaggaatttgtaaggtgtatcgataaagccaatctgcataagcagtgagttgataggaccgctgtcggaaaacaaggtgaagaacaacatggcaaatgcagatgccataatcaggttcggcagatacatcactgtcttaaagaaccgctgtccttttaatttcaggctcacatccgagaaccatgcgcccaaaagcagtgacaggaagatctgcggaataaaacacataatccacatcaccattgtattcttggcataaacccagatgtcaccgtctgaaaacagctttttatagtttgcaagtccgacaaaattcggtccgatctgcgtcagtcccgacagataattctcaaaaaaactgttgtaaatggttgttaccatcggaatcaactgaaaaatcacatacacgataataaatggaagtaaaaagatatagccccatttattataccgaacggcttttgacttctttttcatagcatttgcccccttcttttataattgccggatacgcgttccggctggtcttccgctcccggagatccatcggaacccctatcctttgtatacagagctcacagcagcccttcctttttttgcagacctgctgtcagctctgcatttctacacagattacctgtattttgacatagaatgagccacacccgccttcctgatggccggcaggcgtggctcctgtcattctatccttcgcatctttttctggcatccatcgatgcgtcagctattgatgctcattctctcagttgctgagattacagttccacgattagtgtgtcagttccggatatttctcctctactgccttgtagaacagatccagtgcctcatccttcgttgcgttgccctcgaagtagttcttcattgcgttctggaactcctcgttgcagccctggtcatatgcggaaaggttgcttaagtcaagaccgtcaacacctgcgcagtacatagctaacggattctgtccgcctaataccttgctggagtagctggtgtcttctgccatagcttccattgtggtcttgttgtttacaaagtcatcatctgcaacaacgatatccttcatgatatcagcgttggttgtcatctgaagcatgatatcttttacaaggcttgggttatctgttccgtttgctgcacagatccatgtaccaccccagaagaatccctgcggtccctgtgttgcgccccatccgccgaggtttgcgatactgccttcgtcctcagctgccatggagaagtttactaaccaggccggtccaaagtagcagaataccttaccgtctggatagaagcctttcttccagtcatcgctccaaagctctgctgtgctggtctcgcctgcatctacaagctccttggaatcgtcaacccatttcatgatgttgtcatcgatcgtgatcttgccgtctgtaacccacttggaagatacgttgttagagtatacacggtaagaatcgtttgcggaagatgtgatcttgtaaccggcatcttttaattttgctgctgtgtcattgaaagtatcccagtcttttacatattcctgtacatctgcaggatcatcggatccgagaacttcctttgctgcttcgcggttgtagaataatacgcccgggcagccctgccacgatacaccctttaatacgccgttggaatcggtaacgatatccttggtgtactgatactgatctgccagatctgcatctgtgatgccgagatccttcacagccatcgtgtaatcggtatctacatatttcaatgcgtaatcagcctctacaaggaacagatcgatcttgtcatcagctgctgcatctgcctgctttaataaggtagcatccaggttattctggtatgcgttgtcatcgttcggtgtgatgttccattttacggttacatcaccgatggttcctgtggttccgtctacgatggtgtagcccggataatgatcttccagtctggacttaaactcctcattccagcagtagatgttgaggactttgccttcatcggatgctgttgcatctgtagctgcctctgtgtctgcatctgctgcaggtgctgcctctgttgcaggagttgatgctgtgttgtctgttgtcgtcgtgtctgctgtgtcggatgatccacatcctgctgccatggatgctaccatggatgcacataagagtgcgctaatgattttcttcttcatagaaaaccctcctccttaagatgtctggctttcgccattggtttgggaaaccttttcctgcgccccgctgttatttctgcaaaaattttcctacggattgccctggtactaagcttccttctataacgactctctcaacgagagttgttcgcggtttttcaattgtgccaatcaatcgcttggctgcttcgcttccaatcagctctgtgttctgacggattgtggtaagtttgggatgtagcagctgtgagatgcgcgttccatcgtaacctgccacggagatatctctcggaatccgaagtcccatctcaatgatgacattccttccgccgatcagggcggtgtcatccgggtagatgatgcaggtcggcacatcggcgagatttaaaagctctctggtctgccttgctgcttccttcgtctcaagataatcggcagtccggatatattcatccggcacctccagtcccagttcatccatcgtccggtaaaagcttgccagccggtccttggtaacataggaattctcctgaccgtggatatatgcaattttccggtgtccctgctggtaaatatacttcacaaggtcttctatgccctgaatgttgttggagcttaccgccgtacagttatgatgtacatagtcgatcgttactaccggcagatcactgttcatcagttccaggacgtccggatcattgtaatcggcacagacgattgcgactccttcaaagttccggtatctgcagtgttcataataggacatcttgcggttctcaaaacaggtattgataaatgtgatatcgtacccctgcttctctgcctgaactttaagaccgttgagcacacccgagaaatattcatgggtaagaccgctgcccgcctcttcctcaaagaggactcctatattataggaacggttggtcttgagtgctctcgctgccgcattgggaaaatacccgagtgcttctgctgtcttcttgatccgatgcttcgtctcttcgctgacatccttctggtcgttgagtgccttgcttaccgttgcagtggagacaccgcatttctcagctatcgtttttaatgataccattgtgtcctccacactttcgaaacatcacttaatcgttttcgtacttttactatatgccatcttttgcaaaaatgcaatacatatttgtcatttcgtcgagtttaacacttttttcgctgattttttgtgcatttttgcgtgttctatttctttttcttctattataagttatattttccctgtcattcttatacgttttcggtttttagccctatatttcggtttttagccctatatttcggtttttcaactcctttgtgtctttcttctatattttacctgcttttttgtttaatctgctgtattcattgtatttatgcgtattttgattgattttttcattttcacaggttatacttttagttagaaattgtttacttaatcgttttcgcaattatttcagtttgaacaattcacttacctattttcgttgcaaatgtttcggaaatgcgtatgcttacatgatatgaatggaggtaagcccatgaaatttggctatttcgatgatgcgaagaaagaatacgtcatcacttctccgcggacaccgcttccgtggatcaattatctgggatcaaaggatttcttttccctgatctccaacacctgcggcggctacagtttttataaagacgcaaagcttctgcgcctgaccagataccgctataacaatgtcccgttcgacagcaacggtcattactactatattaaggaaggcgatacaatctggaatcctggatggatgcccacaaagaccgagctggattcctatgagtgccatcacggcatgggatattccaccttccgcagttccaagaatgatctctccgcagagctgactgcttttgttccggtcgacgacagctgcgagatcaacaagctcacgctcaccaacaacggcagcgcgccaaagacgttctccgttttctcctacgtggaattctgcctctggaacgccatggatgacatgacgaacttccagcgtaatttttccaccggtgaggtagaggttcacggttccgcaatttaccacaagacggaataccgcgagcgccgcaatcactacgcgctctatgcggtcaacgctccgatcgcaggttttgacaccgaccgtgattccttcctcggcgcatacggagagaattccgctcccgaggtggttgtcaccggtgcttccaaggattccatggcaagcggctgggctccggtcggctcgcatcacctttccgtgtcgctggcaccgggcgaatctaaaactttcgtgttcgttctcgcctacattgagaaccccatcgaccaaaaatgggtcggacgcccggaggacggcgtgatcaaccgcgcaccggcagaagccctgatggcgcgctacgacaccaccgagaaggcggatgccgcacttgccgcattaaaggaatactgggacgaactgctctcccacttcaccatctcttcctccgaggagaagctcgaccgcatggtgaacgtatggcaccagtatcagtgtatggttaccttcaacatgagccgttccgcttcctattttgagtccggcatcggacgcggcatgggatttcgtgattcctgtcaggatctgctcggtttcgttcatctgatcccggatcgtgccagagagcgcattctcgacatcgccgcaacgcagtttgaggacggaagcgcataccatcagtaccagccacttaccaagaagggcaactccgacatcggaagcggtttcaacgacgatccgctgtggctgatcgcatgtactgccgcctacatcaaggagaccggtgactacacgatcttagatgagatgacgccgtacgacagtgatccttccaaggcaacggacttcatggagcatctgcgccgttccttccattatacgatggagcacctcggtccgcatggcctgccgttaatcggccgcgccgactggaatgactgcctgaacctgaactgcttctccaccgaacccggagaatcgttccagacgttcggcccttccgaaggtccgaatgccgagtccgtctttatcgccggcatgttcgtgcgctacggaaaagactatgcggcaatctgccgtcacagaggcatggatgacgaggcagcggttgcagagaaagcgatcgccgatatggagaaaacggttcttgacgccggctgggacggtgaatggttcctgcgcgcctatgaccactacaagaacaaagtcggttccaaggagtgtgaagaaggcaagattttcattgagccgcagggcttctgcgtcatggcagagatcggtctcaaagaaggcaactgcttaaaggcaatgcagtctgtcgagaagtatctcgacaccaagtatggcattgtcctgctgcagccggcttaccacagatatcacgtagaacttggcgagatttcttcctatccgccgggatacaaggaaaatgcaggtatcttctgccacaacaatccgtggatctcaatcgctgagacggtcgtcggacgcggcaaccgcgcatggcaggtatacaccagaacctgtcctgcctacatcgaggacatcagcgaaatccaccgcaccgagccgtatgtgtactcacagatgatcgccggcaaggacgccaggaacttcggtgaagccaagaacagctggctgaccggaacggctgcatggacattccttgacgtctcccagtacattctgggcatccgcccggattatgacggactggtgatcgatccgtgcattccgtcctctctcgacggctttacctccagaagagatttccgcggtacgacttaccacgtgactgtcaagaatccgaaccatgtggagaagggcgtcatttccatgatcgtcgacggcaaggatgtcgatgtatccgggatctccggcggcatgattccgatcgcactcgcggacggaaagaaggacgtgaatgtcgaggttgtgatgggataacccgctgaggcttttgtcacaaagaattgtcgcaataagcatagatctctttgggagtgataagtaatattataagaaacacacttgcggatttcgtgtggaaatgcagatggaatattcgttagagaaaaatgtgagtatttcttccggtcgaatgtttgcatcagattccgtgtctcttccacgtttggacaatccgacgggtgcatgtccgacacaccggagacaatggaaaaagatttttggtattgcctttgaagtgggtgccgttaccggttcctatttcggaaaaagattctactgtttcggcgtttggaatttcgtccggaatgtattccagaatgtcgccgggttgacagtttaagagagtacaaataatgttgagtgtttcggttgagatcggatcactgttgcgtaaacgttgtaaagtgctttgaggtaatagtttttctttgcggatgcgtgtggtgttgtatccggcatccttaagctgtgaaagaatatttttatagattatcatttgaagaagaaatgcaaaatctgcggcaagtggtttctgaccaccaacgcacggcacaccaaatactgtggcggctatgcaccgggggacaagctgcaccgcacctgtcggcagatcggcaacctgaaaggcagagaacaacgggagcttgcggacgatcatccggtgaaacagatttatgagaaacggctgccatgtcatctttcctttcgcttacggggctttcaccctctctggcaggctttcccaaaacctttctgctaggattgacgaatcaattatgcggtccgaaccccggaatgcacgcattccggtttggcctctttccatttcgctcgccgctactttggaaaacctattgtatgatattatcagaaacattgcagtgataataccagaaaggggagaatacggtgggagtagataagaaaatattggagcagtatgtagatgcatgtgagatgatccgggagacggagcaggacattaagagattgaagcgtaagcggcaaacgattgtggctcgtttcggtcagggttcctccacatccctgccaaaagtcatggcactacatcgccggggaagcatatcccacacaggctggtcattcgattggaataatccatcgatgaactacctgtatcatagaacatttttgtgccctgtgccgtatgtccacaaagtaggaattaggggtaaaaatcagaaatttccacgattgcggaaagtgtgatataatccagtggggctggctgtcggaaacggaggattttatgttaagacagaccaaccaacaaccaattaccgccctttacccaagactatcccatgaggacgagctgcaaggcgagagcaattccatttccaaccagaagcgtattcttgaaacctatgcaaagcagaacggcttttccaatctgcgctggtacacggacgacggttattctggtgcgaactttcatgaagccctccggggaaccgttaaggaggtcatcacacaggtcagccgcagtaagaaatgggagtccaagccggtgcttggcgaggacggaaatcccatgctcaacgcaaaagggaaaaagattttgaagtcatcctacagtgtgttgcaggatgactttttcaatttcatgcgaaacgccggttataccgatgtggagcgtggagaacgtggaagcaccgaggaacatctgactgtgacccagttcaaggtgcaggcagaacagcagcggctggaagctgtgaccgggcaggtggcacaggcagaacagaatttggaggatgccaaagctgccacagcaaaacagaaaaagaaactggaatctttgcaaaaggaaaccaaggcggcaaagaccattgcgctgacagtgcaggacattgaagtaatgggcaaaaaagccacattcggaaacaatatcacgctgacaccgaatgaatgcgacacactcaaacgctatgcggtcaatggcattatcgccaatgctgacaacaagcgtctgaaagaaaaactggcttccgcagaaaagacggtttccatctggaagcagcggtatgaagcggtaaacgaaaaatatatggaactcaaacagaaagcccaaccctttctggatgcactggaaatcgcatccgaaaaggttcgggcttttatcaattctatcctcatcagaggaaagcaaacacaggaacacgaacaccctgcccggaagcgtggacaggatatggaactttgatggaggaatcgcctattgaagaaatattatgaggaagcgaaatataatgcggcatttgaccgctgtgtggatgttatgagccagatgctccagaaatatggacatcaggttttggataaattggaacaggacgcaccgcagggagtggagcattccgaggaaagtaatcaagcgcagcttctgacggataaggctgcataaaatttgcaatttacacgttgcgtattcgctatggctatgctataatgattacgcaacgtgtatttttttgcttttgtggagaaaagacggatggattgtaaaaacagaattataaagttgcgtgaaagcacaggactgaatcgaagtctgcttcaaacgacatttgcgtatcagcgtaattcaaccacaaaacttcttccctttttactcccgcttctgccagcgtatccttttttatttttctccatcctttaagcgcagtattatacagatcattttcatatccacttatcatcactggtcccggatgctcttccaatgcttttaacatttcaagatggtccgcatccgtcatctcatacttgtataaatatttttttctggtgctttgtaaatacggcggatctgcatatataaaaacgtccgatgtgttatagcgtctgataagatctatcgctggaagattctctatttgaacaccttgcaacctctttgatgcctgagtaatgacatccggatattccgcccatgcttttgctggattaggactattcgtctgctgaccgcttttgaatccattatggtataggttagaacaaccaaacccttgccaacatctgacacaaaatctccttgcccgctcaacatttacatcggatttctgataagataggtcgtactcagttctgctgtatggagtaagttctatcagccgtttcaattcatccggatcatccctaagaacgcggaagaaattcaccacttcaccatgcagatcatttactgtctctatgtgacaccgtggtttattaaataataccgccaaacttcctgcatatggctccaaatacaccgtatgctttggcatgtttcttactatccaatttgctattcgggattttgcccccgtatatttcaatacttgtttcattttttcaaaggaacccggcgcgccttttatccggataggttccggctcctttctctaatttcctttttcgttgaacccaatcagatcaataccatcgaagtccatgctgtactgaccgtctatgtttttatcttccatccaccagtcaaatacaccatttccagttttccatccaattatgtccttatttccgcattgctttctgtattccatcattcggtcaaacgctcttatgtaagcttctttgtactttgggtactccgcgaactctttatatctgttctttcctccaattggacaaccgatgcatccgatcctgctacatccacccggacagccatttttgtacagtgggtttatctctattccctcatgtcttatgtaccaccaaaggaattcatcgtcccactcaataatcggatttactagcgttttgcttgtcctgtagcagctttctactattcgatgtgattccgaattttcataatttagcacaaccacaccgcccttttccgtcaaacgaaggttttcattgtccacgctgtccttaatctttttattcggcgttgtaaatgttacaatgccttgattttttgcacgcattctgctctctgcttttcttacgccagtaatcaatttcttccctacgccgctacgttctttcagttcttcacaacagtaacggaaacgccttgtcggcggtgtcttatgctttacgatcagctgccacattgacatcttcgggtactcaatcaacacttctggcttgctttttatatatctaacagtcttcggtgcgtccaccgttgttagattatgtaccgccacaaatggcacacccgctttttttgccagatgtaaaatcacatcagagtctttacctccgctatatccaagctggtacggctcatttcctgcaaatgtctgcaatatatctattgcctgtttttctaaatccatcttttctcaaggagccgatgcgcatcttcccgggaagctccgctcctttcgatttattttaaaatttcatctaagcaccgtcttgttccatctgctcaaacatttttacataatcgtccgtgggtgctttgaaatggacgttcagagaagtgcgttccggcacgatgtcctgattgctgtagctgtccttttcacgctcattgtgttcctgtaccttcgccacatcagccggtgtttccaagtcctttccaagtttggagcactccgcgggtcatgtccgcatcccggaagacaatttgtaggacttttgtgtgtgtcccttatggcacctctgaacaaaacataaccgcgcgaagccgctgtttgagtcggcatctgccttatttttaatagcagatgccgacgagttcggttcgcgcggttttatattgtctgtgaagaggcgccattagggacaccagaaagtccgcccattgtctccggtgtgtcggacatgcacccgtcggattgtccaaacgtggaagtcggtgccgcagcaaacgcaataagtattccacctggggagtacgttcgcaagaatgaaactcaaaggaattgacggggacccgcacaagcggtggagcatgtggtttaattcgaagcaacgcgaagaaccttaccaagtcttgacatcccactgacagagtatgtaatgtactttctcttcggagcagtggtgacaggtggtgcatggttgtcgtcagctcgtgtcgtgagatgttgggttaagtcccgtacttgatttccttagaaaggaggtgatccagccgcaccttccgatacggctaccttgttacgacttcaccccagttatcagtcctgccttcggcagctccctccttgcggttgggtcactgacttcgggcattaccaactcccatggtgtgacgggcggtgtgtacaagacccgggaacgtattcaccgcgacattctgattcgcgattactagcgattccagcttcgtgtagtcgagttgcagactacagtccgaactgagacgttatttttgagatttgctccccctcgcgggattgcttccctttgtttacgccattgtagcacgtgtgtagcccaagtcataaggggcatgatgatttgacgtcatccccaccttcctccaggttatccctggcagtctccctagagtgcccggccgaaccgctggctactaagaataggggttgcgctcgttgcgggacttaacccaacatctcacgacacgagctgacgacaaccatgcaccacctgtcaccactgctccgaagagaaagtagtatcatcggccgcttaggtcttaaccatcgtgttcgggatgtggacgggtgtttcccctaagcgcatcgccaccagaaaatcgtggctatcaatatttgattgttattgataactcaacagtgaacaaactctttacttgatttccttagaaaggaggtgatccagccgcaccttccgatacggctaccttgttacttaaacgcaaagacccagtttctaacgctatagaaactgtaaacgaggtcaagcaaaaaagagcgcagggtggatgccttggcactaagagccgatgaaagacgtgataagctgcgaaaagctacggggaggagcaaatatcctttgatccgtagatgtctgaatggggaaacccacatgagcatacctcatgtatccatacgccaatccataacgtatggaggggaacccggtgaactgaaacatctaagtagccggaggaagagaaagaaacatcgatttccaaagtagcggcgagcgaaatggaaagaggccaaaccggaatgcgtgcattccggggttcggaccgcataattgattatagttgatctacgcttataagggacaaacaagtcccttataaataaacggctgtctccgctaccgttcctccggcatcatcacactttattcgcttctccgggtatattaccaagtcatacccccgcggcatcatccgcatgttagctagggtattgtctggctatcgatcacgctacagcctattcagttaaggcatccaccctgcgctcttttttgcttgacctcgtttacagtttctatagcgttagaaactgggtctttgcgtttaaaacacggatcgaattgcttcgatcttgaactttcgttcgttcggtttggtcgtaaactttgtttacgatattctcggatgtcttgataaaaaatcattttcatcaaaatcttctgtatgaagttttcaaggtacaatagcgaacttcgttcgcattagaaattgcttcgcaatttccgtcaaacggaatgttttgcaatttcaatggagatggtgagattcgaactcatgaccccctgcttgcaaggcaggtgctctcccaactgagctacacccccaattaaaatatgaaatattttaattttaatctggcagccacctgctttcccataccttcgccagtatagtatcatcggccgcttaggtcttaaccatcgtgttcgggatgtggacgggtgtttcccctaagcgcatcgccaccagaaatatgaagttgtcattcgtatctgctcctttgtactcatgactcgctcgattccgctccgcttcatcttgctagagtcattcgtccaatctgtcttcgcttcaacaccggcttgcaaatgaatttgcaccgttgtctccgctcatccaggcagatactcattgataactaaacagtgaacaaactctctacttgatttccttagaaaggaggtgatccagccgcaccttccgatacggctaccttgttacgataataaaatgtttcatgccggtaatccgattggatatgcagatcttacggggcgatattggcggcagcattttgtatgttgtggaagatatcgggaataatataaggaggtagcttaatgcgaaaaaataaagaaaaagtagtgagagaagagagcgggaacacaaattccggatggaaagttgtgcttgagaaggtaaaagtgtatcgtgaaaagaagcatcaggaaagggtggacagcggtgacgcggagctgccagtgttgcgggttggcacaaataaaagagcggttaggatattgtggggacttatgattgtcagcttagcttttggcatatacaaaaattttacagctgttgacacaaatacggtacacgagcggacggtggtggaagcaaaggtgcaggacacgaatgagcttgagagttttgttgagcggtttgcgtatatttatcatgcgtgggctacagatcagaatgcgagaagtgagaggcaggggttgttgaagtcttatatgacagatgtattggccgggttaaatggtatggttattggtacagattgtccgacatcgtcccaggtattggatgtgaggatctgcaaagttgcggatttgggagataatgcgtatcgtgtgcgttatatggtcaagcagcttttgacagagacagggtcggatgagactgcatcgatcagtaagaaagagcttccggttgttgcgacgtcgcaacagatggaagaagatgataatagtacggtcgtggtagatgattttgaaggaacacagaccggcgagacggcggaagatgtggcagagcagccggagttggcaacggaattatcggattctgctgatgcagatgtagatgcagaggtaaagacatcgtatggtgatgcggtgacactttcgaccgaaaccgttagaaatgaagatgggagcgttacgacaaatacaaccaggcagagttattttgaaattgaggtatatgtggatgaagctggtggaatggttgtagtgacaagtccgacatcctgcggcgtgccgggaaaagctgattataatggtaaagagtatcagacagacggaactgtagatagtgcgtcgatgttgcagattgaagatttcttgaatactttttttggaatgtatccaatggcaacggagaaagaactggcttattatgctgtgcctggaacgatggacgtgatcggcgcggattatgtttatgatgggctgtatgatgctacctattataaggaagatgatcagatcaaggtacatgtttatgtgaaatatttagaccaggttgcgaaagtgacggaaatatcggaatatacgttgacgctggaaaagggtgataactggcggatcgtggctgcagagtagcagaaaagaaaagactttccttgttggagggtctttttttgttgaaaaaaaatgtgaaattgtagttattaagttatatatgcaaaaaaccgggtattcccggtttttggtagaaaaacatagccaatatttcaatccgtgactaccggagtcgctagtagtaccgacatgcaaagcatccattgcatgtgacatttaaaatataatatttttttgtactgttgtcaatgatctgaaaagttttttgaatgtgttatatgagtatatacgaaaaaccgggtattcccggtttttgcattaaaaatatagcaaatatttcaatccgtgactaccggagtcgctagtagtaccgacatgcaaagcatccattacatgtgacattcaaagtataatatttccttgcattgatgtcaaggggaatagtgcagagcatattgttagatggggaatatgagatttgtaaaaatcatagaaagtgtgggtatgtggggaacctgttttatatgaaagtgtggagaagcttgtggggaaagtggttggtaaattgtggaaaaggtgttttgcttttccatgatttatcaatactttgtccatagcttatccatgctggaatgcaggttatccatatatccatgctttaatgataatttgtaaaatgttggaggtgtatttcgtggaatacttcgtggaatactttaccgaaaaaaggttactttttacgaaaaaagagtgttgttttggaaaaagaacgacatagaaaaagccagtaaaatcaacaattctttgaatttactggcttttttgaggtaagcagacaacgggaatcgaacccgcctcctcagcttgggaagctgatatactaccgatgtactatgtctgcaaaacacatattattattatagcgtaaataaaaaagattgcaaccactttctatgagagttgttcggcaaaattgtttctgtacaggattagttgtttaaatcgtgtatcggaagaagccttgccagaaacatggaaagacagaagctatgcttacaaaaacaaaaccagaatcattgacacataatttgtgcaaatagacgaaaaaataaatgaaaacgcatgaaaagtaaaaaaagtgttgaaaacaggatagaattctaggggttttttgtttggagttatatataatgtagatataaggaggaaggaggaagcgtagatgcaaatgaaacttggaaagcttctggcagagaccaagacgggagaaaaaagacagattgagcctgaaaaagatggaagaggacaaaagtatgaatttgaactggcggggtatcatttttttgtaagagatatggtaaaaaaaacagaagaaagtgataaagagaatcaagaatattttatcacaagaagaattgtgggaaagagaaaggaagcttctggaaagaaggaaggaattgcactatcaatgtaccttgagtttggagaagaaacggatatttttcgagtgggaataccgtcagcggtatatggtgcatatgtaagtcgagaggaaagtacatatcactcctttatggaggatcgcctgacaggagtgatgctgcttttatttgatgaggatcataagaaatcaacggttgtgcagaagatgaaccctgcaaaatatatagaaaaggaagagcggaaacgtggagagggcaggtacctgcataaaacagagactacgtccatagggtatggcttcggggaagcagcttatgtaaaactctgctggccttatgaggaacgggaaaaaagtgtggcgcttgattcaatggagactcctgcacaggcattctatccgttggaggaggaacagatagaacttgttttggaatacagggtggcacacaaagaatgcaaaacctttacggatggtctgtatcaggaatatcaggaactttcgcggcggcttgtgaagagaggagagaagacagtgcgcttgcctttttctagggaagagggaatacaactccgaagaaagtgtgtaggcagaacttaccgggaatttggtccggatggagcgggttttttcttcgatttcgaccctgaatatgggtatgagtcggaaccttccggattcgggacgtctttccacacgattccacataagacttacacgcatattctggaatacggatttaccggacgtcagcttaatattgcgcttgatctggcaatgcatagtgaggactatttcaggaaagctgagagggtcatagatttctttgtgaattactgtataacggaaaatgggtgggtgtactcattgtacgatacagaaaagggagcgccctttgcgtccttcggagatgcttcagcgcctcggttgcactatatgtactacgaaaaatgtaagggcaattatttgagaactatgacagagccaatgctggatttgttggaggcatatctttggtatcggaaaaaaggagtaaaaaaggaaaagtggctggagagcgttatacgctttgccaattttctgttagagaagcagaatgcggatggctcctggtgtcgggcttattccatgaccggagagccagtgtatatgaatgatcgggaggactacactacggaagaaaatgacagagggagaaaagcttctacgattattccggtaatgtttttgtgtgcgctggcaaactgcctgggcgaggaaaaataccttcaatcggctaaaaaagcgggcaattatgcattggagcatgaggtgagatgggaactttaccaaggcggaaccatggataatcccaatgtcgtggataaggaggcctcccaatatatgatggcaggtctgtatcatctctaccagatgacaaagtctccagaatatctggaaggggcactgtgcgctgccaagcagtttgttacatggaattatatctggaacgcacctatgagaaaaggaaatattcttttttccagaggattttgtacgaagggaatgggagccattaattccatctggtgcggtggtgtggttgacatatactcgctcttccatatccgggagctatacttgcttgggaaagaagcagaggaatcatttcttatagaaatggcagaagatatcagcattgcaacccaacagattctgtcatggtctggagataccatgggcttttgcgatagtggcatgcagccggagggatttggaatctgccctcagggaatggatgagggaatgattgaaaagggagatatctggggaactctgggttggatctactcagctggaatctcaggaatggagcggtatttgaaggtgataacatagaggctgttctctgtccaggcgccggacagaatagtatgataaaagaaagcaaaaacaaaaggaggatttactatgaagagaagaattacaagcatgctgcttgcagcggcaatgaccattactatgctgacaggatgtggcagtcaggggaaagaaacagaaaaaacagatacgggtgcaattgtattggacatgtatcatagctggagcaccgacagcgaaagaggagcggctttggacaaactgatacaggaatttaataaggaatatgagggaaagattgaagtaaaagttacaattaatcccgatttcccagcatatcaggaaaaggtaaaaaccatgatttccactgacacaacgccggatatttttcattataattttaatcctaacgatttatcgagacagaagtcaggaaaactgatggacttttcggaatatatggatgacgagtggagagctagatttggagagggagatcttgaaaatctgaccatagacggagagattacatctattccttttgaaaaggcaggagcagttttctattataataaagaagtatttgaaaaagctggaattacggaatttccaaaaacctgggacgagcttttggaggcgtgcaaaaagattaaagacagcggtgtgacaccaatttccctttacacggcagatgatgcatggtatacctgtaatctgtttacatatcttgcggcaggctatgcaggtgtggatgcactgaacaagggcggcgatatcaatactgaacagatgaaggcggcagctgcaaagctgaaagagttctggaattatacgacaggagatgctataggagcaaactattctgtggcaatgaataattttgcatctggtaagactgcgatggtaattgacggaccttggctgattggctctcttggtaacgatatcaaggataagattggaattgctcaggcgcctacttttggagacggaaccgtatctgaaaattatgtgattacagatgcacaaacaccatgggcagctgcaaagacagatgataaggaaaaggcggaggctatcgtaacctttatgaaatacattacttctgaggaaagtgtaaagcaacttaccctggaaggggcggtgttcctttctccgaagcttgatatggaagatccagatgtacagggaacaggcgggcttctgggagaatacctcgctctgaacgcgaacgctgaggagagtaccgtaaatatccagagaaacttaagcacagcagccaattcgaagctgccgtccctgttggaagagcttgcccttgacaggctcacgccggatgcattcattgaacagcttgcggcagaaaataagtagataacccaaggaaagagaaggagcgtgtactatgaaaggacaacaaagactgttgtatttacttcccgcctgtatattggtgtttgcctttttcctattcccattggcttatctttcctatataagtttttttgagtgggatggtttaggaccaaagacattcgtgggatttgagaattttgaatatgtgttttcggatccgattttccggacagcagtgaaaaacacgattgtgtggcttttatcggcactgctccttcatatcccttttgggcttttgttggcacttttgctgaatcgaaaaccaagagggtggaaggtatttcgggtaatgtattttatacctaatgtgatctcaaccacagccattgcatttttgtggtattttatttaccatgtggacgtaggacttttgaacaatatgttgaatgcggtagggttaaagaaactgacccatgcatggcttaatgatccaacaacagctctgtggtgcaatctggttccatttgtcgtgtatgtggggttgacgatgattatctttatgacgcagctttcgacgataccgaaagaactttatgaggcagcggtcgtagatggagcaaccagcctgcaggtggatcttaaggtgtatctgccattactgaaaccagcgtttatcacgaatattatgttgaatctggcattctgtctacgtacctttgagtatccgtttttaatgacgggaggaggaccggcaaacagcaccatgaatctgtcgctttatatttataaagagatggtgggagcaaatcggtatggcatttccatggtagcaggtcttgtgacagtatttatgggattgattgtaatggtattcgtcaatattctgcagagagaaaggaggaactgccatgcataagaagaaaataacaccaacaggagcattgctttatgtatttctgacggttgtactggtatttatgatgattccgtttgtctggcttctgatttcctctttgagaccgaatgcagatttgttcaatgaaccatttgcagtgcccaaaacgttgtcctttgaaaatttccgggcggttatggagagccatcccatgcttttgtactttgcaaattcggttgccattgcaacgattgccacggtaatagctgttggggcggctacgcttgccgcctacgctatgcagcagagatttttaacaaggaagagtctgacggtattattttccatgtgcctttttattcctaccaatgcatttatggtgccatattatgttatgattaataaaataggactgtacgataatgtactcggaattgccttagtatatgcgggagtgaatctgcctatgagttttatggtaattaagggctatatggatacgattccgggtgaacttttggagtcagcaaagattgatggagctactgcaggacagtctttctggaagattattcttccggtatcgaagccgggaattgtgactgcatgtatctttctggtcatcaattcatggaacgaactcctttttgcaaacctgctgaatcaaagtgactcttccagaaccattcaggtggcgatccggtcgttccttacgacttttgaggctaattatgcatatgcttttgcagctatggtaatttctatactgcctacaattattatctatgcattgctgacagatcggattatcggaggtatgactgcaggcgcagtaaagggatgattgcaatgaaaatcatgatagtagaggatgaggaaaatataagagatggcattagaaatctcgtagactggaatcaggaggggtttgaagaacccctgctgttttccagtgctgtggaggcgcttgtgtttttagagacagagacagtggatgtggtgctgacggatctctatatgccggtgctgaatggaattgaatttatccgtatgctacgagagcagaaccaagtgtgcgaggtaattattctgacaggacacgaacgttttgaacttgccagagaggccattgcattaggagtaaagcagtatctgctaaagccggtgacggggcagacgcttttaacagaactgcacaaagtcagccgggaaattcaagagcggatgaggttaaaggactgggtcgatattgcgaagaaaaagcttcatgactatcttccggtcattcagaatcagttttggaatgatcttttgttaggaaatttaattgaactgaagaaaattaaggagagagcggaggaggcggagataagcattccggagtcggaaatgacctgccttgcggtgcaaaggaagggggaacagctggaaagagacaggatcaccagagaaatggcgcttcgggaacttacagaagaaatattaggggaaaaatatttgggtgctcttttttataacggaatggagatggtgatatgcaagggacggatttctagagactatgtggagattctgaatgagtctgtcaagcataatttcggctattctatttcaattggagtaagcacggcacaaaaagatgcgacaaatctgagaaatctggcaagagaggcgatggatgcggtgcagtccattcatgaagaggatgtaatatcttatatctattaccgggatattgaaaataaaaagaaggaaagggtggaatacccgtacgaggaggaacgaaggattttacatgagattcgattccagaggcttccagacaggaacttgcttcggaaatttttagaaaagcttcttcctccccggtattcggtggaaaagtctaaaatgctgcttttacagttccttttagcacttgtacggatggcagatgaactagagatagatgttgcgacggagtttggaaaagcggaagcaagcattgagagtctgcagaaggtggaagaagcattggagagaatgatcacaagaatggtcagtgagaaagagaaaatgtccagaagatatacagagattcttgtacagtcggcaagaaactatattcaggagcattttgctgacgaggagctttcggccggaaaaatagcagaagcagtgggagtgacacctaattatctgtccagaatttttaagagtattacaggagatacctgtgtcagtttcctgggcaaggtaagattggatgaggcaaagaaacttttgcgtgactcttcatttaaaagctatgaggtggcggaggcggtggggtacaagaatcctaattattttggtgctatgtttaaaagatataccgggtatacaccgaaggagtaccgggaggcttcgtatgaagataagaattaagtctgtcaaaagcaagataatcgttttctttatcggtctggcagcgttccagatctgtgtgatggcagggtttgccaaattgcagttggagccatccattgtgagtatgtattcagaacatttagaacgatttgcagatgtggcgttaacagaaacgacacaggagacggagaagatagaacgttatatggtaaatatcatcggtgatgcccagattcaggatttcctccgcagagcggacgaggagcagagtgcagaactgccgccggtgttgtctacagaacttcgcaaccggattcttagctatacagattacgataatattattacggcaatatatctcgtggataattatggaaggatttacagtaatcttgggaaaagccctatgcagacctttatgaaccgcaatcaggagttgaaagacaggaaggaggagtctgctgtctggtatggaggggaaaatggaaataccataacggtgtaccggaacgtcaataataacaccacagatctcacacaaaagatcggagcgttgtgtatttttatagaccgcaagatgtttcaggaacgcattgatgatctgatgatggaagaagaacagcattatgttctggaaaatgaggagcggcacctaaagatttcttcagatcaggatgagacagaagaaagggacagtattgtggtgatgagaacggatggcaggtgggggctgagaacctggattgaaaaggatatcatttaccgaccggtgaagatgatgatgcggatcctgctagcagaactttttgcactgcttctggtgagtattgctctggtggtatttctgtcagaacggattacaagaccaatacgtaagcttactattgccatgaaggaaattggagcgggaaatattgatacggtggtattagatgagggggaggatgaactagggcttcttgcagcaaccctgaaccgaatgtcaaaaagcatcaaaaagctcatggagcagattcatgaggatgagaaacagaaacgatatctggagctaaaggctatgcagtatcagattaatcctcattttctctataacacactggactctattgccatgtctgccagaagaaatcaggataggcagagtgaggaaatgacccatgctctggctgaatttttcagaatcggactaagccacggagcggaatatgtaacagtggaaatggaggttcggtatgtaaaagcctaccttgaaattcaaaatatgcgatttcccgatttattgacatgggagtgcagtatagaacatggacttgaggagataaaaattttaaaatttattttgcagccgctggcggagaatagtatttatcatggctttcgtgactcgggagagtgcggtcacatagagattcgtgtatataccagcggaaaaaatctgcaactttgtgtatccgataatggaattggaatgatgccggaacaactggaaattctaaaaagcaggatggcttggaaacagatgacagaacagagtattcaggaggggggatttgggctgcagaatgtacagcagagattgcagcttgtgtatggtacgaaagccggacttcacatagaaagtgagtgggaggaaggcaccaggatcacggtagtgattccggatataataaaaacacattcagaaaaggaagggagtgtttgatatggaaaaagcaagaccggtttcgttgaaagagatacgtattagggataacttttgggataaatatcggagacttgtaagggaggagattctgaaatatcagtggtgcgctatgaatgatcagattgagggcgcgcctaaaagtcattgtattgaaaatttccgcattgcagcaggagaaaaacagggagagttttacggggctgtgtttcaggactcagatgtggctaaatggctggaagcggtagcatatacattggcagagaaaccggataaggaactgaagaaactggcagaccgtgtaattgaactgatcggtagggcacaggagccggatgggtattttaatacatattttattctgaaagagccgggacagcggtttagaaacttaagagaagggcatgaactatatactttggggcatatgattgaagcggcagtggcatataagcgggcgactggtgaaaaacggtttctggagattgtacagaagatggcggatctggtggcaaatactttcggagtggaagagggaaaacgcatgggaatgcctgggcatcaggaaattgagctggctcttatgaaactttatgaggaaacgggtaaagagagctataaggaactggcaaaatattttattgatgtacgtggctgtggaaatagaaattattttctggaggagatgaaacaaaaggacgtaaaacgtatttttccggagcttaacgactatcgtccggaatattcacagtctcaccttccggtgcgcaaacagcgcacggcggaaggacatgcagtgcgggcagtttatatgtatgcggcaatggcagatattgcagcggaatatgatgatgaagagctgcttggcgcgtgtgagacgttatggaataatatggtgcatagacggatgtatgtgacaggaggaatcggatcatccgggattttggaacgctttactgcggattatgatcttcctaacgattataattactgtgagtcctgtgcatctatcggactggcgttttttgcgcggcgcatgatgcagattacaaaaaaagcaaagtatgtagaggtgatggaacgggctttgtacaatacggttcttgcaggtattgcaatggatggaaagagttttttctatgtcaatccgttggaagtatggccaccgagctgtatggagcgaacctccaaagagcatgtgaaaagtgtaaggcaaaagtggttcggagtagcatgctgcccggccaatatttcaagaacgcttgcgtcattgggagaatatatttatgcctgtgagaaagatactatctatgtgaatttgtttataggaaatgagacgcagattacagtgggagaacagaaggttcacctgtcattggagactgacttcccgtggaaaaatcaattcaaaatcaacgtttccggcgtgaaggaaagcgtacagcttgcagttcgtatcccagaatatgcgcaggattataaaattttctgcgagggaagggagcagttttacaaggaaaaagatggatatgcctacataacctgtgaaaagaacggaaggtatgaagttcagtttgtttcagagccacgctttgtgagggcaaatccaaaagtaagagcagatgaaggaaaggtctgtgtgatgtggggaccactggtatatacagtagaggagacggacaatggagaaaatcttcaggctctttacatagatactgccaagccggtaaaaaaaagtgaaaaagaggaatttccaatgttgattgcagcaggaaagcgtatatgtgaaagcggttggggcgaggaagaactttatggaagtcatcctttggaatttgcagaaacagagattacgttggtaccttatgcttattggggtaaccgggaaaacggggagatggcagtgtggttgaaggagtatctgtctgatagaaataataagtaaaaaaggatatgttccacttgatatactaccctcataataggacaatgaaatataatagtcctatatgagggcagtttcatgtccagaaaaagtaagataagtccaatataaaaggtcaaaatagttgagcaatagttatatgttttgtgagagatcagtgttgaagtggagacgaatatgatataatgaatcctatcggattcatattagaagttcctacggaacttcggatgcgcagaaagcagcgcaaaaagatgatagggcgaatgcccgtcagtccgggaaatctttgatttcccggacgagcactgcgctacaggaaaagggaaagttattgtgccgcgcccggacatttgccggagcgtagctgatttgcatgccgggcactgcgctactaccagaggagaaaacaatgaaaacagttgcaatcgtggcgtgttccaacgggcagaaagaagaatatcgaagccagaacgaggaactggcacggtatctggagaaaacaggacacaaggttttatggagcaatgatatctatgaaaaaaatgccgcattttcaggtacgggagcagagcgcgccgcggaactgatgcgtttcttcaatgatccggaggtggaggagatctatgacatttccggaggagatctcgccaatcaggtgctggacgggctggattatgccgccatcggaaaaagcagggcagttttctggggctacagcgatctgacgacggtcatcaacgccatctatgcacagaccgggaaaagcagcgtgctctatcaggtcaagaacatggtctggggagagataaaagaggtgcagcgacggagatttgagaaccgtacggcgctgtttgacccgcaggttcgctttgtgcagggggagaagatggaaggcgttgtcgtcggcgggaatatccgctgctttttgaagctggcgggaacccgttatttcccggatctttgggacaagattctgctgttggaagcatacggcggtgaggtgccgcagatggcgacgtatctggcgcagctaaagcagctgggggcttttgagaaggttggaggaattttactcggaacatttacggcgatggaggcgcatgcatgcagcccggatatcactgcactggtgaaggaggcggcaggaacgaagattacgattgcaaagacacaggaaatcggtcacggaaatgacgcgaaagcaatccggatcggagaaaagatatactgctgcggagacgaagcatgtcgaagcgttgttacagatgctgaaaggagacagttggaaaccagatgaaaaaagagatgacatacacagaactagcgaaagagacggcaatcctgacggctgccgtggcgattatcgccgcagccgtatacttttttctggtgccgagccacgcatccgtcagcagtatctccggtctcggaatcgtgctgtccaactttataccgctgccgctgtccgcgatcacgatgatcttaaatgttgtgctcttaatcattggattttttacctgcggaaaggaatttggcgtgaagacggtttacaccagtgtggcgctgccggtatttctgggaatttttgagagaatcttcccggattacgaatcgctcaccggcagccaggaactggatgtgctgtgctatattctggtggtcagtgtgggactcagcattctgtttaaccggaatgcgtcttccggcggactggacattgtggcaaagatcatgaacaaatatctgcatatggaactgggaaaagccatgtcgctgtccggcatgtgtgtggcgctttcggcggcactcgtctatgacaagaagacggttgtgctcagtatccttggaacctattttaacggcattgtgctggatcattttatttttgaccatgacatgaagcgccgtgtctgcatcatcaccgaaaaggaagaagaactgcgcaggtttattatagaagacctgcacagcggagcaacgatctatgagtcgatcggtgcatacaatatgcagaagcggaacgaaatcatcgccatcgtggacaaggcggagtatcagaaactcatgaattatatcagccgtgaggacccacatgcattcattacggtatacacggtgtcagatatccgctatcagccgaagcggcagcaatgaagaatgcgatacaactgttgtaaaagggagaaacatacatggaaatctacgataacgcagacagttcatacaaagctgccggggcggaaacctaccatctgccggttctgtatacggaggacgagcgcagcagctacgccgcatggggcatcaaaaaagaaaaactgttgatgccgtttgccattgtgacgatcatcattgatgcgtttgtgctctgtgccacggtcgtttatctgtttgaggtacagcggcagaagccggcattttccgtctggctttcctgttggggcggtgtggtcggcgatgtctcctatggtgtggcgctggtcttgacggttcttattttaaagccgctcgactggctgtttgataaaatcatgcacagaccggagcaaccaaagatgttacaggtgacgccgaaggaaacgggcgtctcgtatctcattcttcgcggtacaacggtacttgcgcaaggactgctcccgtggaatgcgtgggaggctgcgctcactgtggagacgaatgagatattgctcgaggggcagagactgcggatcggaagcaatacgatcgcatcgatctatccgcctgagaaacagaagccgtggatggatcatccggcggagcagataacgggaaccatcagcctggcgcatatccggaaaaatatgcaggggtacctggcgtccctggaagaacagaaaagggaagcagagtggagacggcagaatccatagatctgccggtggaaaataaaagaaaatggagacagacacagatgagatatccgaaaaatttatccgaacatggaacgatcggttttgtggcgccatccttcgggtgtgcgactgagccgtatcacaccgcatttttgaacgcacagaaaaaattccgggaaatgggacatcccctggatctcggaccgaattgttatgccgactgcggaatcgggatcagcaacacgccggaggcgtgcggcagagaactgacagagtattattgcagcgataagaatgaggtgctgatctcctgcggtggcggggaactgatgtgtgagacactggacgcggtggattttgaacagatccgggcagcggtaccgaagtggtacatgggatattccgacaatacgaacatgacatatcttctggcgacgctctgcgataccgcttcgatctatggcccgtgtgcggcggcgttcggcatggagccgtggcatcagagtctttcggatgcatatgcacttctgcgcggacagaagcatacggtaaacggatatgatctctgggaaaaggaaagcttaaaagatgccgagcatccgcttgtgccataccatgtcacggaacagcggattttgcatgttttcccggaaccgacggaggcacttacggtgcagggacgcctgatcggcggatgtgtggactgtctggtgaatcttttggggacaacttatgataaaacaaccgggtttgtggaaaagtataagaatgacggtatgatctggttcctggaatcctgtgatcttaatgtgatggcgatccggcgggcggtctggcagatgaagcatgccggctggttttcccatgtgaaagcttttctgatcggaagacctgccgtctacgggcaggaactgatggggctggaccagtaccatgcggtgtgggatctgttgaaagattacggggtgccgatcattatggatgtggatatcggacacctcgcaccgatgatgccgctggtgtgcggaagctatgcaacggtgcaggtgaacggaaatgacatctccgtgaagatggaatatttatagaatcaggttaatatttttgccgatgccggtgtttaagagggtatccagatccagactctgggatacgatctgtgccgcagtggtggcagtgccgtcatccggactctctgtggcaccggatgtggtggtgccgtctgttgcggaagaacctgtggcagcggcattttttttctgcatcagcaggttgttatcagaggtaacgagcgcctcgccgcggcttgcaaaccgtttggcatatgttgaggtgcgctgcatgtaagccgcatcagcggaaaaaagttccttgaacttggagagatccgcactctcaaataaggttgtacggcttgtgagtgtgccgtcatcattgacggtgatgccgatcttatcgagttcggaagagtattcgctggtaatatttttcaactgctttgcactgcgctccaaggtacggtccgaggaactgccggcagaggaaagcatgttgttgtaggtctggatataggcgagcacgctgttgcgtgtgttggcgtcctggtcatccgaaaaatcagaggaagtcagccggcgtactgcctgacgaagcgccctgccgtctgcgagagcgagctggttgccactgaattcacggcgtttggaggaagtcccggcttcccggttggaacggtagaaactgcgcaggtaatatttggaacttaaggtggtgccggatccgatatacgctgtatttgacatagtgattcctccttaaaaagattctctaatatgtttcggcagaatgcggcatagaattaaccatagaaaacaaaaaacggatatgctatactaaattccaaagaattcagcctgggaacagaaactactgaattctggcgactgggatgtatgagaggaggatatcatatggaagcaatgatctggataggtctgattattctttttgtggtggttgagattgcgacggtaggactgacgtccatctggttcgcagggggcgcgctgatttccctgattctgtgcctgtgcggcgtgggactgggctggcagatcggcgtatttttcgtggtctccctggttctggtggcatttacccggccgtgggcggtgaagtatttaaagccgcacctgatccggaccaactacgagcaggcgatcggtgaaaacgtgtgtctgacggagacggtggataatcagagaggaaccggcactgcggtctacaagggacaggagtggacggcgagagccagcgaggatggaaaaagatatgaggcgggaacgatcgtgaaggtaaaggagatccgcggtgtgaccatgtatgtcaccgaaagcggactgatgccgcaggttccgacaccgccgcagacagagcaagaggcagaataatatgaagcttggaatggtatttgagggaggcgccaaccgtacggtgttctcctgtggagtgatggatgcgtttctggaggaggggctgatgccggattatctgatcggcgtctccgccgggattgcatacggtgtatcctacctgtcgggacagaagggcaggaatatagaggttgtggaaaattatatcgcggacaagcggtatatgggcatgcggcatctttttaaccggaacgagaaagcgtatttcaatacgaagttcgtgtttgaggaagtgccgaatgaactgattccgtttgactatgacgcgtttgcggcgtatccgggaaaagtcgaagccgcagtgaccaacattcataccggaaaagccgaatatgtcgaagtgccgaggggacggaacatgcgcgatacgctggtggcgagctgttcgctgccgattcttttccagccagtgaagcttggcagacattattatctggacggcgggattgccgattccatcccgtatgagcacgcgctggcggagggatgcgacagactcatcgtggtgctcacaagagagcgcggatatgtgaagaagacggagaaggcagtccgctttacggacaagctgtacaaaaaatatccgaagattgtggagagcatggattcccgggcggagcgctacaatgaatgtatggccagactgcaggaactcgagcaggagggaaaaatcttcgtcatcgctccggaatccacctatggggtgggacggacgaccacggacgtcatcaagctccggaggctttacgacgagggttatgaactgacagaaaagcgcatgcaggaactgcgtgcatatctgggataagaaagagaggaaacaaacgatgaagatcgtatttctggatgcaaagacgatcggtgatgacatcgatctgtccggctatgacgcgttaggcgaggttgtaaaatacggattttccacacccgaggaggcaagagaacgcaccaaagacgcggatgtgattgttctcaacaaggttgtgatcaacgagcagtccatcggtgaagcggagcacttaaagctggtatgtgtgacggcgacgggaaccaacaatctcgacaaggaatatctggatcagcgtgggattgcatggcgcaacgtggcgggctattccacggagacagtggcacagcatacgtttgcattattgttctatctgctggaaaagttgcattattatgatgaatatgtaaaatcagaaaaatatgtgggggatgtttcctttacacattttgacaatgtgtttcatgagctgagcgggaagacatggggcgtcatcggtcttggcgcgatcggcagaagagtggcggacattgcgggcatgttcgggtgccgggtgctctactattccacctccggaaaacacgatcagccgggatacgagagagtagattttgatacgttgctcgcggagtcggacatcgtgtcggtgcatgcgccgctggatgccaatacggaagggcttatgaacgccggagcgtttgcaaaaatgaaaaaatctgcgattttcctgaatcttggaagaggaccgattgtggtggagaaagatctcgcggaggcgttaaagagcggtacgatcgcggcagcaggactggatgtgctctcggcggagccgatgcgggcagacaatccgctgcgtgagatcaaggacagtgataagctgatgattacgccgcatatcgcatgggcgagcatcgaggcgcgcacgcgtctgatgaagatcattgaggggcagatccgggaatttttccatctgtaaaagaatgcgcccatttgggggcgcatcagcttggaatccgcgcatccagaccgctgtggaaggacaaattgccgtattcttttagaaattccagagtgagctgtttctgcagctcactttttggttctgtatgcagtaatgtgtgaagctttcgtatcatggtaaggcagcgcgcactgcttttttcgtacagatcaaaaaagctttccgtggagacgcgtgtggcatcccagggattcttccaggaggcatgcctcaggttaaaaggatccgtgcggaaaaacagtgtgtcgctcggtatcaacggggaaaataacgggtatcccagaaaatgcttctccatgaaccggaaaagaacctttttttggccggtttcatcgtgaagaatccgcatgccgagcggaagcgagatgattcccatccacatggtgctacgatgaatggaaagttcggggaatgcgtaatgataggcatcgtacaggagcccggcaatcacgcgtttctgggcaaaagtcagctggatcgtatcggcggcgtggaattcacagggtgtcttgtggcgctttctggcaagcagttcggtgtcgatctctgtctcgagataggcatgtctggaaaaatagcttttctccttcttgtcatggtaatgagtcatggcatagatatagggatggcatgtggtgtcgagcagatagtgccccaggaaaccggagatgtaggcttcggcaatgccccggtctgcggcggacgagagacgcccgtaactttccagcagtccgtgaaaaaaggcacgcggctccgtggtgtgtgcgagggcaccgagattgtggcggtgcagggcataggacggaagataatagaaaaacagatccggtccctgcagtccgaacgcataagcgctgcggttataaaacagattttttttctgggaattacattttaactggtgatagatttcttcgccaaacagataatgtgtaacaaaacctggcatgggaattcctcctttcgttcatcatgagtataaccattttacaggaaggtgttaagtgaggaatggaagatttaagaaaaatgtaataaaacaaatagattgacaatcaaaaaaagagtgttatactatcacgtagtaatggaaactatataatatagttcggcgataatcaaaacagtcagattgtcataagatgatagacaaaacaaggaaaatgtatatcgggtggcaacacttaaaatgcattgcatatgtaaaaaaagagcagtattccttatactttcatcttagaaaagaattagtgtgtatggaagaaaacggaggattaagtgatggcaaatttagcacagtcagtagagagaaaggcattcagcgtggcgattgatgcagcattgaagcatctgaataaggatcgtgaaaaaggcctgcttcagattgttgatcttgcagaaaagttcatgggcgataacttccgtaaggaagcgtatgacggagccagaaagatgattcaggatccggacaataaatggatgcattatgtaaatcgtcttctggatgagaccgatccccatgtagcaaagatgacagcattaaatctgggatatcaggcagcatttgtgggaacgaagacgattcgtaagatgagggaagtacataactgtaacatcccgtggctgatcttaatggatccgaccagtgcatgtaacctgcgctgcaccggctgctgggctgctgagtacggacacaagctcaatcttacgtttgatgagcttgacaatatcgtgacacagggtaaggagcttggtatttacttttatatgatgaccggtggtgagccgttagtcagaaaagacgatatcattaagctctgtgagaagcacaacgagtgtgcatttcactgctacacaaacggaactctcgtagaccaggcattctgtgacgagatgaagcgtgtcggcaacctgtccttatccatcagtcttgagggatttgaggaggccaatgatttccgccgcggcgaaggtgtatttgacaaggttcttcatgcaatggatctgcttcatgagaacgggctgatcttcggtaacagcgtatgctacaccagcaagaacatggatgccgttacatcggatgagttctttgatcttctgatcgagcacggaagccgtttcgcatggtacttccatctgatgccggtaggtatgaaggcttcaccggaactgatgccgaccagagaacagagagaatatatttaccacagaatccgtgaggtacgtggatttacaggcggtaaagagatcttcgttatggacttccagaacgatggagagtatgttggcggatgtatcgccggaggaagaaactactgccacatcaacccgaagggtgatgttgagccgtgtgtatttattcactattcaggagcaaatatccgtgagaagtctctgttagagtgtttacagcagccgctgttcatggcatacagagacggccagccgttcaatgagaacatgcttcgtccatgtccaatgttagagaatccggagctgctccagaagatggtacacgagagcggtgcacactcaacggatgttgaggaggcggagccggtagagcatctttgcggaaaatgtatggagtatgcatgccagtggaaagagacagcagataagctgtgggcagagcatccgtaccagcagaagggctacaccaactttaagaaaaaataaggggcgatcgttatcagcaaggcgaaaaaacagatcttaaaatgggcattggtacttgtcatcatcggaatcattgtttatacattccgggattcagcaggaccgatcttagaacaattagaaaaaacgacaccggcggtcattgcaggcatctgtgcaatgactgtcgtgtatcactgtgtcgagggcgtgattaccacgctgcttgcaaaacaatataatcgtgaattcacattaggcatgggtattaccaatgcctttttgtgctccttttaccgcgtggcgacacttggcagcggagcaggggttgccgcgattgtctatctgggtgagcacggtatagagtattccaagagcttcggaatgtatatgctgcagtacgcgtttcataagatcagtatcgcgtttttctcaatgattctgtttgcactgaactggaattatatgcgggtacattttggggagtatatgtggctgctgctggcgggatatcttgtaacgctgatcatcaccgtggttttaattctgttcagctgttccaggcagtttcaccgcatgctgctttgggtggtggatttcttcaatggaaagacgaaagggcggtttgatccgcaggcagcaatgcttcatgaccagtgccagatgttggaggatgcatccagacagctgatgggagagaagcggctggttgcgggtgcagtgggattgaacctcatcaagttcgcattctggtattccatcccgtatctgatctttctggggcagggggagattacgctcccgcagacgatggcggtcacatcgctttctgtcatgcttgcggcagtcattccgtcaccggcgggaatcggttcgaccgagtttgtctttaccgcacttttttccggtattgtcggaaccggactggcaggctccgcgtcgcttctgtaccgtttcggtactttcgtattcccgtttctggtgggggcggttgtggtcatcatacgccgcatctacctcaaaaaaacgggacaagccaaacgatagcgccagctgtgaaatgaggctggtacacagggcggagaatagactggcagtgatacgataacagtaagtacagcagagttccagaatagaaacagtgcgtaggaattcggatcgcaaaatacggaatttctaactctgccgctttttacatctgtgatgatccgtgtttttccaagttttgagcactccgcaggtgtgtccgcaggccgacagacaatttaaggacttttgtgtgttccttacatcaccaatgaacaaaacataaccgcgcgaagccgatgtctgaattggcatctgccttattttcaatagcagatgccaacgagtttcggttcgcgcggttttatattgtctgtgaagcggtgatgttaggaacactaaaaagtccgctcattgtctgcggcgtgtcggacacatcccgcggattgtcaaaacgtggaaagacacggaattggatataaaaagcggcagagaagaaattctcgcattttgttccaacgaatatcctatgcactgtttctatctggaactttattgcatcctacattttattgtgaccggcaatctattctccgccctgtgtgcgagcctcattttgcgcttcttttgaaaagtttaaggtttgggaaattgacaaacgcacaagtcatgataaaattaacgttggcatgcaaaaaatatgtaaagaaagcgtaaataaggaaacatatgaaaataaaattatattttgacaagggtaatttgggcagacttgcggtggcgatgatctttgccgcggtattgttctggaaaatcggcttttcggtgtgggcgctgccggtattcggagcgtgctacttcctatttaagagtctggaggtggaactgtcagagaagatcccgtgggtctggaccggactgatgatcggcgccagcagtattttcacggcgtatcatgtgcagtatctgctgctggatgcagaacttcgcgccaagatcacacagccgaagatgctgctcaatatcttgtgctgtctggtggtatttctggcggtacaggtttttaccaataatacgggacttacctgcatgatttcccacatttttctggtgtcattggcgggaatcaactattttgtatatctgttccgcgggaacgaatttattttcagcgacctgaaatccatccagaccggactttcggtggcgggcaattatgagttcgtgatggatgaccgggcgggctatgtgattctgatttccacgctctatgtggcgctgatccgcaagcttcacgtttcctttaaaaagagagtgccgatggcgatcatctgtatctctcttgccgtgctgagcggcgtgtatatcggtcataagacggagtacatagtgacagagacctgggagcagaaaggaagctaccgcaacggatatattctgaattttgtgctgagtataagagactgttttatcgctgcgcccggcgggtattccagtgaggcagtcaaagcgctggaagagcagtattccggcggggatagcggcgggaagaagcagggagagaaagacgctgcctcggcatatgcggatgtggcggctgatccgggagaaaagccgaccattatcgtggtcatgagcgagtcgtatgcggatctttcggtggtgggagatttttccacgaatattgatgtggcgccttatttccactccctgaaggagaatgccattcacggatatgcgctgtcctccgtgttcggtgcgaagacgccgaattcggagtgggagtttatgaccgggaactccatggcatttctgccgagcggttccgtggtataccagcagtatatttccaagacgccgacctcgattgtgtccaacttaaagaacgacggttatacctgtgtggcaatgcatccgtactatgagaccggatggagccgcaatgcagtgtatccggatctcgggtttgatgagacacattttatcgacgattttgaacagacgaagcttctgcgggaatatatcaccgaccgggaactgtatgagaaaattattgaccgctatgagagccgtgcggcgaatgaggatctgttcatcatgagcatttccatgcagaaccatggcggttatacggaaaagtacgataattttgatgagaaggtacgcctgctgggattaaactatccggacgtcaatcagtatctctctctggtgcacgagagcgattcagcgttggagtatctgatctcctattttcaaaatgtggatgatccggtggagatcgtatttttcggcgatcaccagccaagcctttcgtccagtttttatccgaacttaaacggcaagggactttcgggactgaccgaggatgaactggaagatctgtatacgataccgtttttcatatggacgaactatgagagcacggaggtggaactgccggtcaccagcatcaattatctctcgacgctggcgctggagcgggcaggaatagaacttccggcgtacaatcagttcctggcggatatgatggagaccattccggcaatcaattccagaggctattattccaagtccgccggcggatttttgcacatcgaggaagcgacgggtgaggaggcggactggatccggaactataatattttgcagtacaacaacatgtttgacaaaaaggaaaagagtgaagtattctttccttatctgaagtagtattaagaaagcaacagagatacagctttttagcgggcaatgtgtataagaaaaatgtggaggcgaaaaaatggagagagtgacacttggaaaaacagggattaccgtcaataagaacgggtttggcgcacttccgatccagcggatcagcacggaggacgccgtgaagctggcgcgaaaggcatatgatgccggcatcactttttttgataccgcgcggttctacacggacagcgaggagaagcttggagaagcgtttgagggcatgcgggaaaaagtctatattgcgacgaagacggcggctgccaacgcggacgaattctgggagcagcttggtatttccctgcacaatctgcgcacggattacattgacatctatcagttccacaatccgtccttctgcccgaagccgggcgacggaaccggactttacgaggcgatgctggaagcgaaggcacagggaaaaatccgccacatcggtatcacgaaccaccggcttgccgtggcagacgaggcgatcgagtccggactttatgagacgcttcagttcccgttctgctatctggcaacagagaaggacatcgagctggtggagaagtgtaagcaggcgggaatgggatttatcgcaatgaaagcgctctcgggaggattgatcaacaattcggctgcggcatacgcgtttgaggcacagtatgagaatgtgctgccgatctggggcgtgcagagagagcgggaactggatgagttcatttcctacatcgaacatccgccggtcatgacggaggagatcgcggcggtgatcgagcatgacagaaaagaactctcgggcgaattctgccgtggctgcggttactgcatgccatgtcctgccggaattgagatcaacaattgtgcgagaatgtccctgatgctgcgccgcgcgccgtcggaggcacagctgacgccggagatgcaggcgaagatgaaaaaaattgagggctgcctgcactgtaacaaatgcaagagcaaatgtccgtacggactggacacaccggcactgcttgcgaagaattacgaagattacaagcgggtactggcgggagaagtcagcgtaaaataagagatgcgcagacatgcagaacgacatgcaatgcgcgtaatgcacacgtgaggcgaagaggagtgggagaatgaagaaatatgagaccgtcatttttgatctggatggaacacttttgtatacactggaggatctgacaaaagcgacaaactatgcgctgcgcaggatgaatatgccggagcgcacactggatgatgtgcgccggtttgtcggaaacggtgtggcgcgcctgatcgagctggcggttccggagggaacggcaccggaagtctttgagcagacgcttgcgattttccgggagtattatgatattcactgcaatgacaatacaaaagcctatgacggagtgattgatctgctccgggaactgaaggcggacggatatgcgcttgcgatcgtgtcgaacaagccggattctgcagtgaaggaactggcggagatttattttgagggaattgtgaaagtggcaatcggcgagagtgccggagtggcgaaaaaaccggcgccggatacggtctatgcggcattaaaggagcttggcatgccaaaggagggcgccgtgtatgtcggagattccgaggtggatgtgatgacagcgaaaaattccggtctgccgtgcatttccgtcctgtggggattccgggaggaagcgttcttaaaagaacatggtgcagatcattttgtccgcgaaccggaggagatcagagatttcctgaatgcgtaggtctgttgagaaatgtttcacttttagtaaggaagtaccattgcatgatttttgtacataaagtacaataaaaataatgagaaacacagaagagttgtgcggaatcacaacaaggaaggcggcatggtatgaacagaagaagtgtgaaacatacgttaacgatgacctgtctgatgctggtattactggcatccctgttgcttggggcaacttccattttcagtatccggaatacgaccaatatggcgctgacggaatatgaaagtgcgatggattccggttacaacacagagatcaagtctgaggtccagacggtgattgctgtgctgcaggcagaatatgataagagccaggcaggggaactgacagaggaagaagcgaaagcagaagcgaaggagatcgtccgcgccatgcgttaccgcgatgacggaagcggatatttctggattgatgatacggattacaatctggtaatgcatccgattctggcggagcaggaaggaaataaccgctacgatctggaggatcagaatggtgtcatgatcatccaggagattatgaaggtctgtaacagtgccgacggaggcggattcaatgaattttactttacgaaggcggacggtgtgacggttgcgccgaaggtagcatattccgagttgtttgcaccgtggggatgggcagtctccaccggtaactacgtcgatgacatgcaggcagagatgacgggtgtggaaggacgcatcaaccagaagttcgaggttctctgcattgtgatagtgataatgatggctgttatgcttgtgatggcgttcgtgtgggcgagaatctatgcggcgaagctctgcaagccgctggtggagatccaggggctggcatccagactttccgacggagatctgacaacgaccgtgaacgtaagggagaagaacgagctgggagacacggcagaggcactcaatgccgcgcagaagcagattgtttccctgataggaagcatcagcacggcatcaacagatctgcggaatgcactgcagtcgtttactggtaatttctcctcgatgcaggagtccatcggaaacgttgcggttgccgtcaatgagattgcggaaaacagcacgacgcaggcaggatccacgacggaagcgtccaacggtatcatgacgatcgcggaaggcatcgagaagatctccagcgagatggaagaactggtcggcaatgccaatcagatgcaggagtattccaataagtcgctcgctaagcttcgtgaactgatcgatacgaacaataagacagaagcggatatcgagtcgatgtatacacagacggagagtaccaatgcatccgtcaataagatcagcaaggcggcgacgctgatcagtgagatcgcggatcagacgaatctgctttcactgaatgcctcgattgaggcggcgcgcgcaggagaagccggacgcggatttgcggtagttgcggaagagatcggaagtcttgcgacacagtcggcagatacagcgcatgagattaacgacattatcggagagctgacagagaattccgagaagtcgatgggcattatggtacagatgaatgatgcgtcgaagcagcaggtagaggcgctgaatcataccagcgagatgtttctggatatgcagaaggcactggaggcgtgcacgaattccatccgcgtggtgacggatatgatccgcactgcgaatgaggagcgtgagaaagttacacagagcatcgaggtgctgacgcatcttgcgacagataatgcggcatccacggaggagacttccagtatgacaaccgaactggagggaacggtggagcgctccagcggaatgatcgagaagctggagggcgacatgaaagtgcttgcagacagcatggagcatttccggttgtaggaagactgtggcaagaatacaaatgataagatgagaatgaaagcgggcgtgtcagaaactgacacgcccgtaatttcatgtctgcagatattctgcgaatgtgaatatatagctgggtacgaatagggaaaaaaccttttatatttcacatgcggcatcatatgctgatttaatggcatgatcgatattgctcggacgctctccggcacaatcgccaatataatgaagcgggagcggacaagccgaaagatccggaagattctttcttgcgccaacagccattacaacgaaatccgatctgatctctaagaccgaggttttttcattttctgttttctcaacaataactgcatggtcattgatctctgatagttttgcagaggtaaggatctggacattggaatgctctaattcactcatcaaagttgggagaatcgtgctgctttcttcctttgcaatctgatccatcatttcaataattgtaacgttacatccgcgggcagcaaggtattccgcagtttcaacacctacaagaccaccgccgatgacagatacgttgccgaatacaatttcttttttagcaagaatatcccatgcacttgtaacggttggaagatctttgcccggaacgggaatgattgcattcgttgcacctgttgcaacaattacttcatcaaacgaatcatagtcttttccggtaaattcctgacccagacggaatgtcactgataattcgggaagcacgttaagatagtagttaatgcttctcatcatttcttcttttcggggtggaacgctggcaataagaagctgaccaccgatctggagtgacttttcaaatatagttacctgatggcctctcagagcggcgacacgtgctgcttcaagtcctgcaattcctgcaccgataattgcaattcgctttgctgtgactgcaggagtaatctgacggcttgtctcataaccattctcggcatttaatacacagcttaggaatgcacggttttggatattgtctgtacatcctttattacacatcatacatgttctgacatcgcagcagtgtccatcggcacacttgtttgcaaaatcaggatcggtaagcagtgaacgcccgagtgcaacgatgtcagcagagccatttgtaataacggcttcagcagcttctggtgttacaatacgaccaaccacggatacgggaatggaaacgagttccttgatttttttagagtatgaaaccataaaaccatatggctgtgtccccatagcaggaatggtgtcccccatatttccggtgtggttagcctgcgcgacatgcaatgtgtcaacaccggcagcttctaattcttttgcaaaaatgcaggcctcatcaagtggaagaccaccttttccccgaaagccgttatctccaagaggagttacgattggaagcttgtagtcgataaccatatctgggacaattgcttttaaacgccgtacaagagttaaggcgaaacgtgtacggtttgcaaggtctccgccatattcatctgttctgtgatttaaaataggagagcagagcgatccgacaaggcggtctccatgtacttcgatacagtcaacgcctgctttgtgggctaaaacagcacaattttccatgtgcttaataatttcatccagttcttccgcagttacttcatttacaaagtgctgcatatcatggtgaagtttggctcttgcctcctgcatttttccctggtgaaacatttcgtttaaagctgcgacgttatagtctggatggaacagctggattccaagctttgcaccgtatttatgacatgcatcggcaagccgctggaagccttctgcctgttgaggagagtaaagttttggtgtaggagagaatgttgaaagaggagcaacgtctccaatgacaatgtatccaacaccaccttttgcaaggcgctcatagaaacgaaaactctgttcgccgatagatccatctttttcttcgtatcctgttgtaagtgggggaaacataatacggtttttaaattcaatgtttccaactttaatgggctctaataatttcattgtgcacacatcctttcaaagtgattatcttatttcaatggtgttaaaaactctaatatgagcctgtctaattcagctcttgcagaaccgcttgcaaagttgtgatttgcgccttcaattgttttgtaactgcatttgccattatagagtgcttcatatcgatgacaggtagcatcatctaccagatcgtctgccgttcctctgataagaagaacagcacctgtatatcccgctgcggatgaaaacggttcatactgatataaatcatggttaaaagaagtagggaagcaaagcccttctatatctgcttttgtgattccctgtgcttccattgcctcggcgcggtctttacatccaaaccacatgccggctcccgggcacatgagtatgagagcatgtggattaacgataggcgcagcagtggcagctgcatagccgcccatgctctggcctgataaaataattttatcaggattggcaaaatcctgctgttttgtccagtttataatatcttcgatatcatgtaagataccggtgaatgtcatgtcctcgaactcaccgtcgctttcgccatttccgtataaatcaaagcggacgctggcaaatccgttttcagccagaaatctggctgtgtgggtatagatatttttgtatccgcttttatttccggtaaatccgtgtacgttaatgatggcggggaagcgcgagccttcatccggaatatttacaattccgcgtaagacatgacctgagcggtttgttatttcaacttgttttgtcaatgcaagatacctcggtttctgaagttattctgcgtttgcagcatttcgtttgtctgataaattctgtaacatttcagctgttttctcttttgtaagagggtatacaaactttaatacaagtacagctaataagtacccggctacatataatccggtatatgttttccagagacgtccggagaatgcttcgctctgaacggcctcatttacgttaaagcctgcgattgcaagtgcaaagctgctcatacttccggatacggcattagcaagcttacggaaaaatgtatatgcagagtacacgataccttcgttacgttttccggtctgaagttcctgatagtcaattgcgtcatttacaagggcccagactaatacctggaaaccgctgacaccaagataacagattccgttgataataataaagagcattgggttctcaagagggaaaaagaataaaatagcataaacaacaactgagaaagttgcactatacataatccattctttctttccaaatttctttgcaacaaattttgtcccaatgaatgcgataagcgaccagataacgcttaacatgcctgaaactgccataatggcgacatttccgaaatagtcacggaataagtaggtatttaagccgtttaccataccggcaccaacgataccaataaagctggataacataacaccaagtaaagctttgtttttggagatggctttcagcacgtctaaatagttaagcttctctttttctttggcaactggctcggtgataatacgctccttgcaccagtgtgatgtaaacataaggcagatgaaaccgataacagcacagatggctgccataataaggaagtggcttggtacaggctggttgtctttgtataagaataatggaccggcaataacgatgacggtcataaagattgtgccgccaagacttctgaagcgtgaaaggtcggtccgttggtttacatcatctgtcataacacttgaaagacttccaaatggtacgcttacacatgtgtacataatttcatatacaacatatgtgatgaacatgtaagcaagacgggcaccataagcaaaattacttacgttgacgaagcctaagatacaaaggactgcggttggaaaagcaaagaatttaatccacggaatgaatttgcccttacccttgttctggtgactgtcaacaagtgcaccgattaatggatcgtttatggcatcccaaagctttgtgataagcataaggattcctacgtgcaccgggttgaccttcagcaccagggtataaaaaatagcaagatacatggctcggaactgttctgtacagcaacatcccaaatcgccaagagtgtaaccgattttgtccttcatggaaaatggtcttgtttctttcataataaaatacctctcgtttttgtgttgttttggtagctacatgttcattatatggggattagagagataaacatatacaaaaattgcttgcaaactatggaaaattgatgtattgtataaattgacaaaatgaacaaaaatatggatgctggaatgtgcaaaattaacatatgaaaaaacagagttatgagatggaatatataaaaatagaagatagcggacagcgcagttttggacagaagaaaaaccatacaattatttttgtgacaggtggtatgggatatttacgtcaggaaaatgaaaaggcggtctgtaccatggaggacttaatatttattaagcctggcaataaagtgaagattgaatatcgaaaaaacaaatatccgttagaactatatgtgctctatgtgggaacagagttattgcagagcttatcagatgaaaatacaagacttgacgaggcatttgatatcgttccctttcaggttaagaccgttcattctgagagtgaatctgccatgcttataaagaatatttccaaaaagctgtattcaatgcttaaggaatctcctaaatttgcacacacattgtatgagaaaagcctgctgacaatgcttctggtacttgcgttgcggtcgtctgtcaaggaggacgtacagctaaaattaaataagaaaaagcatgttgtaatggatgatattttcatatatataagagaacacctgacagaagatatatcattggagcgcctggaaaacgagttttatgtaagccgctatcatattgtgagagaattcaagaagatgacaggcgaaacgccacattcatatattgtaaagagcagactggatctgtgcagacactatatagagcagggaaaaagtatccgcgaggtttatgaacttggaggatttggcggatacaatcattttttcagggcatttaagaaagagtatggtgttactccaatgcaatattataaaaatctgcagatcgacaggaatgaaagataaattgataaaaacagcagtatcatgtttgaaataatgcaatgggtaacggacagtttcccgaataaattttcagttttcccatatactaactcccaagctaatatatagcaaataagagaggctttatccacagagatggaaacagacaaagcgctcttgcgaaaataaaacattggaggaaaatttatgaaagcaacgggaatcgtgcgtagaatagatgatctgggcagaattgtggtgcccaaagaaatccgcagaacgctccgcatacgtgagggagatccgcttgagatatttaccgaccgtgagggagagattattttaaaaaaatattcgcccatcggagaattgagccagtttgccggggaatatgccgagagtctggcgcacacgacgggatatctggtgctgatcacggacggggatcatgtggtcgcggcgtccggcagtggcaagagagattttgagggcaagcccatcagcggacagttggaggagatcatcggtgagcggaaaagtctggtagcttctgacgacgaaaagacatttgtaaaactgacagcggacgatgccggcgagtacagacagcaggcaatcagcacgattatctgtgagggggacgctattggcgcagtgatcctctgctcacgggaagaacgggagaaaatgggagagacagagagcaaacttgtcgcggcggcggcaggctttctgggcagacagatggaacagtagaacagaactggaaaaaggcatttgaaacagtgtgtttcaggtgcctttttgggcatatgccttgaaagaagccgggagacatgataatctcataaggcaatgagtttcatggaaagttagaaaggtggaaacatatgagcgaaaaacctgacgtgacgatgggggaaatgaccaaaacaaatggaacgtctggcaggaaggtgccgaaaaaaatcatatggacgatcggcgcagtggctgtggcggcaattattttgctcattggaatttgcagcggagcatttttgagcagaagtaacaggattctgcttgcagcaagaaataccataaaagatctgcccacggttgttgagaataggaatgttgcagatattatagcatccggaaaatatacgattggtgtaaaaggggctgtcaggggaaaagactttgatggaacgtttaaatacaaagatacacagctgcaggcagggggaacgatttcacttttcggtagggagaatctggattttctggcaaacctggatgatgagcagctctgcgcaagcatcccgatgcttacagataatctgctggtatacaattacaaagaagagaaagacggctacatagtggatcttctgggagcggatggggttgcatcgatcgatgcggcacttcgtgaacttacctcgaaagaagaacagaacagagcggcgcaggagatcctgtccgtaatatacgatgagtacaagacgctcgatataaaaaaagcagaaaaagaagaattcatagtggacggcagcgccagaaaatgtaacgggtatgaatttaccgtcacagaggatgaacttctgcaggtaatggatggagtgaaggaggtatacgatgcgtattacggtggagcagcagatacattgaagctgaagctgggggatgacttttcgcagctcagagatagagcatgcagtatgggggatatcaatgtaaaagtctatgtgtatcagaataaactggcagcggttgttgcggaggcggaaaattctgatacggcattccgcctgctgttcaagggaggagaatacagaatgcagaatctggaattgctcgcagaggatttggatggcgagcattccatactggaactgacaggtaaagcagcaggggaagaagggggctatgagtttttgattgataatggtgagcatgatataaaccttgtgatttcgatcagtggggaggttcaatttgaaaaaatgagcggcgacagaatagatgtgggcaacatgtctgaagcagatctgagaaaatttattttgcgtacggttggaacaatcatcacaagccacatcaggtaaccgcaagacggggataagaataccagtatcccggagagagatgtgacagcagccgggcgtgtgagtggagatgagactgtattacggtgcacggagattggaaagatacagagaagaacaaatatggcaaaataaagccaagatgtgtaattgttccacagtatggatctgtcctataatgaggacaaagaaaaaaggcggcgtctgacggtggagaagacgatcagatgctgcgggcagggggaaaacatggagaagtatggttttggcgtagatgtcgggggcacgagctgcaaacttggtctgtttacagacagcgggaaactgatggaaaaatgggagattccaacggataccagtgaacagggggaacatattatagaacatgtggcagcctcactggaacgcagacagagagagcgggggcttgcggatgagcagatcataggcgtcggcattgacacaccgggaattgccgggcgggatggagttgtcagaggcgctgtgaatctgggatgggaggcatatccggtgcaggagcagttaaagatgcgcctgcagaaaaaggtctgtgtctgcaacgacgcaaatgcggcggctctcggagaactgtggcagggcggcggcagggggtaccgcgatatggtgatggtaacgcttggaacaggcgtgggcggagcggtcatcctgaatggaaaagtgctcgcaggcgcccatggaatcgcgggcgagatcgggcatatgaccgtgttccacaaggagattgagcggtgtgcctgcggaaaatacgggtgcgtggagcagtatgcttccgcaaagggactgatccgcataacgagacaattattggagaaaaaggatccttacacgatactcgttgatacgccggaactgtcggcaaaacagattctggatgcggcaaagagaggcgaccgtctggcactggatgctgtggaggttctgggaaaagcgcttggaagcgcgctcgcagccgtggcggaagtgatagatccagaggtctttgtgatcggtggaggaatcgccggggcgggagagatcatcctgcgtatcgtacagaagtattacagacccgacgtactgccggcaggtgcggacattccgtttgaactggcacgtctgggaaatgatgccggcatgtacggcagcatgaaacttctgctggactcctcagacgaaaaataactgccggatttctgaagcatagaatggcatatattttgtatggagagagagaaaacgataagttccagatgcagccggcagcggcattctttggagtaaaatccgagtatttcttccgtgccgcgtcggacatcgaattctgtgtctttccacgtttggacagttcacggggagtgtccgacaaaccgcagacaatgagcggactttctggtgcccctagtggcaccgcttcacagacaatataaaaccgcgcgaaccgaactcgctgtcatctgctattgaaaacagggcagatgacaactcagacagcggcttcgcgcggttatgttttgttcagtggtgccacgaaggggcacacacaaaagtcctaaaattgtctgcggattgcggacaccccccgtggaatgttccaaacttggaaaaacacagatcatcgaggatgttcgacgcggcatggttagaaataccggattttgcgatcagaatgtcgctgccggctgtattctggaacttcgtattttctgacatctccatcataaaacatcgtccattccggtttcagaaatccggcagttatttttgggagagggtacatgccggataaacttgtgaaacatgccgcgacagtgtacaatagaggtaattaacgcagaacggagaagatgcagtttgaaatttatacatatcgcagatgtacatctcggggtaaagccggatcagggaaagccgtggagtgagctgcgggcgcggcagatctgggattcttttgcagatgtgatcggggtggcaaaaagagaaaaaccggagtttttgttcgtgacgggggatcttttccacgcacagccgctgaaaaaggaggtgcgggaggtcagccgcctttttggagagattccggacacacaggtccttttgattgccggcaatcatgattatctcagggaaaagtcgtattacctctcggatttgtggccggacaacgtgacggtatttaagaaagaggaagcggaagcagttgattttccgaaatacaacacgaccatatatggactgagctactggcacagggagatccacgacagattgtatgatgagctgcgccctgtaaaccgcagcagatgcaacatcctgctggcgcatggcggcgatgagcgccatattccgttttcggcggagcggatattacagaacggatttgattatattgcggcgggacacattcacaggagcggctggctcatgccgcacaaggcggtaatggcgggaagcctggagccgacagactgcaacgacaccgggccgcacggatactggatgggaacgttaggtgcagcgggggcagatgtatatttttacccgctgcgccactgcgaatattgtcatgagatgtatcaggcagaccggaacacgacagaccgtatgctgtgggactgggcaaaggagctgttggagcagagaccggagtatcagtatttccgtctgtatatcaaagggaaaaaagatccggagtattcctttgatgtgcaggagatcgggaagctcgaccggattgtggatattacagaccagacggtgccggattacgattacgagaagctgctggaggagcacgcggattcgatacttggggaatacatacgcagtatgcgaaaaaaagaaccgggcgtctgcaccgcaaaggcactggagtacggtgtgaatgcgctgctcggctatgactgctgacggaatgcctgaagtatgacaaagagcaaaggatgggacagacatgcagattgacagagccgcaatttttcgctttggaaagctggcagatagaaccgtggattttgccccggggatcaacattgtatatggaaaaaacgaagccggtaagacgacgctgcacgcgtttctgaccgcgatgctgttcgggctggaaaaaggccggggacgggcaaaggggacggagggctatctgcgctatgagccgtggcatgcaccgtcctattacagcggtgcgctgcagtttagcgtcggaggcagaccgttttatctggaacgcaatttttaccataaagaaccgagagcacgcctctgcaacctggcggacggggaggaactgtccgtcgcgtacggagatcttggaatgcttttaggcggggtcacccgggaggcgtatgagaacacctgtgacattccgcagtgccgggcggtgacgggagcagagctgaccgggcttctggcagagtatctttccgatatgtcggacgggggcaatgcgggaatccgcgtgacgcgtgcggtggaaaaactggagcagaaaaagagaagcctgcagtcgcagatcaaaagtgaacaggagaagcgggaacaacagctgcagcagcttactgtggagcggcgcatgctcgaggaggactgcggcaggcttcgtgagcagatcgagaaggcggcagcggatatgcgggcgtatgccaggatgcacccgcaggtgagagacggacagcgaccggaagatgcccgaactgcggaaaatgcggggactgcgtcagacagggaaaggagagctgacggaaacggttttcctgtgagaagcctttttctgggactggcggcagcagtgggactggcaggaaatgcatggtggtatcaccgcgcgggttatgcgccggagctgtttgcggcggcggaaggcgttcttgccattctgctcggcatcggagtggcaggcatactgcgccataggagcgcggggcaggcgcgtgcaggagaaaatgggaaggagacgacggaggcgccagagagcgcggcagcggaggacgcggtgcgcatccggcttgcggagtcggaaaagcagagcagacgcctgcttgcagggttggaggaaacactcgcggagaaggaaacgagacgatgcaatctggcggaacagctggaagtatgcagcggagcgggcgcacgggagagagaactccagctggaacttgatgccgtcgagatggcaaaaaatgagatcatccgcctgtcaagggaatacggggacgagcggagagatgagatcaacagtgtggtatccagatatgtctctgcgattacagagggaaaatacgatctggcggaagtggacgaaacgggaaagctccgcgtgcagacggagggaagagaggttttgccggaggcgctcagcagaggaacgctggaacagttctattttgcgttccgcatggcagtcgggagcattgtgacacaggaagaaccgctgccgctgcttctggatgaaacctttgcaatgtatgacgatgaccgtctgcggcagacgctgcggcttctggcggcaaacggatcgcagacgatcctgtttacctgccagagacgggaacagaagctgttagaggaactgggaatcgcataccatatgatagagttatagtaccgtttgcgttatgtgcaaagtggggcaggacggcactgcgcgacacgtgagaaaagggcagggaggaatacggtggctgcaaagaaaaagaagaaaaaatatcggggattctggatatttgtcaaagtacagtttgttctttccctgctggtgctcggcgggctgggctactatgtccttggcggatatgcctcagaggtgagcagcatccacaaggaagcggacagtctggtacggaattccacggaggagacgttccggagataccgcacaagcgttgtgtatgcggcggacggcagtgtgatatccaagctcaatgaccagggagcgtcctattatctaaagcgcgacgagataccgcagtccgtgatagatgcggtggtctgtatggaggatcagcggttttaccagcatagaggtgtggacttcagagcgcttgtgcgcgcggcgaaatcactgattgaaaaccggaagatcacgcaggggggaagcacgatcacaatgcagcttgccagaaatgtatttctgacgcaggagaagacctggcagcgcaaggtggaagagatttttattgcacagaatctggagaaaaaatataccaaggatcagattctggaattttatctgaataatatttattatggcaacggctactatggaatcggggcggcaggcagaggctactttgacagcggggttgatgaactggatctctcgcagatcgcgtttttatgcgcgattccgaataatccgaccgtgtatgacccggttacccatatggatcatgcgattgagcggcgcgaccggattctggggaaaatgcgggatgacggtaagattacacagatggcatatgcggcggcggtggtggaaaatattaccttaaagcggccggaggcgatggaaaaaaataattatgtggaaacatatgcctattattgtgcgacgcgtgcactgatggagcaggcagggtttgtgtttcagtatcagtttgcgacggaggacgagagggaagcttacgagcgggcttacagcgaatcctacagcgattgccagaagcggctgtacacggagggctatcagatttatacgtcttttgatctgcagcttcaggaggaactgcaggtagcagttgacgataccttatccggttttacggagaaaaatgacgagggtgtttatgatctgcagggggcggcagtctgcattgacaacgataacggctacgtgcgcgcgatggtgggcggcagggagcaggattttgacggatacacgttaaaccgcgcctaccagagttaccgtcagccgggaagtgcgattaagccgctcacggtatacacgccgtcgttcgagcggaattatacgccggagagcattgttgtggatgaaccggtggaagacggaccgaaaaatgcgaacggtacctaccttggaaatgtgacggtgcgcaccgcagtcgaaaaatcaatcaataccattgcgtggaagctctatgaagaactgacgccgcaggtcggtctgtcctatcttgagaatatgcatttttccagattggatgcggcggattatgtaccggcgacagcgctgggcggttttaccaacggtgtgtcgcctctggagatggcagccggatatgcggcgctcgccaatgacggaatgtaccgcgagccgacctgtattatgcggattacggatgacactggagcggaagtgtatctcgctgcacaggagggacaggaagtctaccggcagaatgcggcacggatgatgacagacgttttaaagggtgtatttatcaacggtacggggcgcggactgggactttcagatatgccgtgcgccggaaagacgggaacgaccaacgaccacaaggacggctggctggtcggttatacgagatactacacgaccagcgtatgggttggatacgatatgcccaaagagatggacagcctgatgggtaatacctatccgggaaaaatctggcagacatttatggagcaggcgcatgagggactggaatggctggattttctgccctatacgcagattccggatgcttcttccggggagatggaagcagaggatgcagcgacggatgagggaaatgcacagggggaaacgccggcggagaatggagacacaccgcaggagaatgtgacggatacaccggacacgccacagggaagtgcgacggatgttccgtcatcttcacaggaaaacgggcaggggatatcggatacgccggatgccacacaggaacagccgtcagacgctccgcagcagaatacaacaggaacgtcacaggaaaatgcatccgacgtatcgcaggaaaatgcagcgcagtcatctggggaaaatgcagcgcagtcatccggggagaatgcttcggatacgccgcaggagacagcgcccggggcaccttaagagaatacaccttaacattgacagataagactggaaacgttatcataagcatgggtaaaggcatcggcagagtacataacagacagaaaacgatgcaaggatacaaatagggaacaggagaatggaagcatgaaaaaatatgcatttggagttgacgtagggggaacgacctgcaagatcggattttttgagacggatggaaagctcattgacaaatgggagatcaagacgaataaggaaaacggcggagcatcgattctgccggatgtggctcaggcgattgagggaaagctgacagaaaagggaatctccagggacgatgtgcagggtatcggcgtcggcgtgccgggaccggtaaaaaatgacggtgtggtacaccgctgtgtgaacgtcggctggggtgttgtaaatgtagaaaaagaactgggagatctgaccggactgaaggtgaaggcaggaaatgatgcaaacgtggcagcactcggcgagatgtggcagggtgcggcaaaaggctgcagagacgtcatcatggtaacgctgggaaccggagtcggcggcggtattattgtcgacggcaaagttgtagccggatttgacggagccggcggtgagatcggtcatattacagtgaatgcacacgagaaggagcagtgtaactgcggacagtacggctgtctggagcagtatgcgtctgcaaccggagttgtgcgtgtggcgaagcgtaccctggagaagacatcggaagataccgcgcttagaaatcatgcagatctgaccgcaaaggacgtatttgacgaagccaaagcgggtgataaagtggcgcttgaagttgtcgatgaggtatgtggcattttaggagcagcactttccaatatcgcatgtgttgtgaatccggaggtcatcgtaatcggtggaggcgtctccaaagccggtgatattctcacggatgcagtgaagaagcactttgttgccacttcattccacgcatgcgccaacacaaagttcgtacttgcgggactcgggaatgacgccggaatgtacggctgcgtagagatgctcttagattaaaaagggctttcgcccgcgtgcatcgcactataaacgggatacgttttattatgggaagcagagactatcacgttccagatgcaaccggaggcggcaattctaagcgcaaaatccggtatttctaaccatgccgcgtcgaacatccttgatcatctgtgtttttccaagtttggaacattccacgtggcgtgtccgcaaaccgcagacaatttaaggacttttgtgtgtgccccttgttggcaccactgaacacaacataaccgcgcgaagccgatgtctgagttatcatctgccttgttttcaatagcagatgataacgagtttcggttcgcgcggttttatattgtctgtgaagcggtgccactaggggcaccagaaagtccgctcattgtctgtgttttgtcggacacgccccggggactgtccaaacgtggaaagacacagaactcgatgttcgacgcggcacggaagaaatcctcggattttgcttcaaagaattgccgcctctggttgcattctggaacttcatattctccaatattcttataataaaacatatcccgttttaaagtgcaaagcgcgggggcggcagtcctttttatagcgctgcctacgcttctacggcgcgtttgcggacttccgcaagtgcatgtgataccggcggaatgcagataataatcaaggtgatgattgcctccggaacaaggtaggatgcctgatagccggcagaatatgccagcgggctcatgccttccggtgcgtatgctgcgaaaaatacaacgccggagatcgttgcaaatacaaaacgtccgatgacgccggcgatatagccgatctgaagtccccactttttcttattgaagaagccggcaagacccagagcaccgaatgccagcgggtagtctaagagcatctgcgggattgtgtagaaaatcggctccagtacgaactgcaccaggccgtaagccactgcggtcataatgccgacatacggaccataccagtaagcgatcagaacgatgaaaagcatggacagcagagtgacggaaccacccattggcatgtcgaacagcttgatcatcgagcatacaacggccagcgcgatcgcaacagcagagtagacgagctgctttgtggtcagtgcggacttgtgcgtggcgttcttgtggcgcacgatagcggcaacaatcagaagaagggcgatgactgcgatgacgattgcaataccgacggtagtcagatggacggaaccgtcaccccagccgccttccggtgtagcaaaaaagttattcataaaaaaatcctccttggtgaatatgtagccaggaggatttgtctgcgttattgcaaaaagcttccttacgccggtattatccggttcaagtaataagggtcgatgaacgatcatctctcagcagaatctgcacccctagcgttttcatattcgatattattataacgaactttactataacgattctatttggaattgtcaagtacgattgtgttcttctccagttcttctgtgagcggcgcaatctgtgtgagcagattggtcatgtcctcgaagagggaactcttggtggtcccgagatcattggcgtgattgatatgctccataacagcgtcaaactgccgttcctcaaggctgaaagactggctgacttcatccagcttctgctctgcggcggacatggcggttgtaatctgctggtgtacggtgtccgcaccgccggcagcggttgtgatctgatcaaacacttcatacgtggaatcaacattttccatactctggttcagggcgtcctgcgaggtggaaatactggtattcaggttggcggtgccctgctcgacgtcgccgatgctgatatctaccgtgctgacaagactcttgatctcactcgcaagatttttgacctcctcggcaacgaccgcaaagccttttccctgctctccggcgcgggcagcctcaatcgaagcattcagggcaagcatgtttgtctggttggcaattgagatgatctgtgccatgcagtccttgatcttctgaacggaaacctggaaatcggaaaaggtgttctgcatttccaaaaagcgctcctgcacttctttggagctgtctttcaatccgtcaacacgctgctgtgcaagaccgacagagctggcaatgtcagatttgacggaagcaaattcaccggaagccctgtccacatcgccgaacagctcatgaaaggaatccagcttttcgcggagtgcggcattttcgtccagaacgagctggaatgcctgtgtgatggactgcagttcatctaaagagtgcacttcgctggtggagagctgcttctggtaatctaacaggcagtccgcaatatgcgcaacgggatgaagatctaagcggctggtggacgtggctggtgcagccgctgcattctttggtgcttttaatgaaaacatggaaatcctcctctttctatcacagattattcaaatacgacacaggtcatggtttggttgacgaactgctgattataatgttctccgaatccaatcagaccggcgtgctcaccgagtgtggacatggttttcagataatcttccatatggtgttcctgtgagaacagaaggtaacggaaaacacagttgatggagaaaacgccggaaatatggttgaaatcgcggcggatgcgctgcagcgtctcatccagaatctcgttgtaatcctgttcttccagaagaacgagcacatcggaatcattgacctgtctgtaacagcagagaccattcccggatacttcctttaaggaaataatacagatgtcctgtccgttcattttgccgagcggattgtggaaagtctggttgatgatattgctctcgctgatatgtaaggcatccatataagcctgcttggaagatttgccgtttaactcgccgacatagtatctgctgcggtcggtattggaagcgatgaagcggtagcctggcatcggtttgtagagattctccttgtagacagcaacttttcctccgttgtttttcacaaaagcgtagacatcggcgtcttcatagaccgttccgttgacagagacttttccaccgtccccggtaccgccgacaagcggaattccagccttgccgagaatgctgtggatcgtggtcagcacacaggcgtcatttccggtacacaggtcaatacagacggtatctttcgaacttgcgtggacgttttttaaatcctgttccatgcgttcgatatatttgaccggcatggtggatgcctgctccaaaacgttggcaacagcggtgacattgtcataaaaagcaaccagaccgactcccttttcgacgaccctggtactgtaactcatgccgatacagccaatgctcgggactcccgggaaaagggattccagttctgtaacgtgtgcctcaaactggtctgcgttggacatcaggataagaagtcccggagcgtgaacgccctgtgcagcttcttttaagtttcctgtctggctcattccaaaatattgtttcatcagcgaactcctcccacatcttattacgaatattgtaagcaattttgcatgatatttcaacgcattaacgcaattttagcaaaacgtttccaaaaaataccttgacaatcaaacaggacagacatatactttgaaaagcaaataatttgattatcaaaatatttgaaaagcaaataattaaaaggaacagggaaaaggagaagaaacatgttagagaagatgagaccgatcattgcggagcagttaaacgtacaggagtctgagattaaagagaacacaaagttaaaggaagatctgggtgcggattcgctggatctgtttgaacttgtcatggcgctggaggaggaattcggcgtggagattccgtcagaggatctggaatcgatcgtgacggtcggagatgtgatcacatatttgaagaaccgcggggttacagcataggcgaagacagcagccgggacataccggtgtttaagggtaagaaaacagaccggcaggaagaaaagaggagaagtatggaaacaagggtaagcagattgcttggaacaaaatatccggtcattcagggtggtatggcatgggtggcggaatatcacctggcggcagcagtgtcgaacgcgggtggactcggaatcatcggggcggcaagcgcgccgccggaagtggtaagagaacagatccgtgaggtaaaggcgcggacggaccgtccgtttggcgtgaacgtcatgctgctcaatccaaacgcgccggaagtggcgaagattgtcatagaagagaaagtgccggttgtcacaaccggtgcgggaagtccggcaaagttcatggaggcatggaagcaggcgggcgtggtggtcatcccggtcgtggcgagcgttgccatggcgaagatgatggagcgtgctggcgcggacgctgtgattgcagagggaatggagtccggcggacatatcggtgcgcagacgacgatgacgctggtgccgcaggtggcggatgctgtgtcggttccggtcattgcagcgggcggtatcgcggacggaagagggatcgcagcctcctttatgcttggcgcagagggggtacagatgggaacccggtttgtcgtggcgaaggagtctattgtacatgaaaattacaaggaacggatcgtaaaggcgcgcgacattgattccgaggttacaggcatgagcaccggacatccgatccgggttctgcgcaatgcgatgagccgcgaatatttaaaactcgaaaaagagggcgccggatttgaggaactggagcagctgacgcttggctccttgcgaaaggcagtgatggacggggatgtggtgcacggcagcctgatggcaggacagtgcgcgggacttgtgaaaaaagaacagacctgtcaggagatgatagaggaactgatggcgcagaccgcggggcttttaggtgacggagatttttgggaaaagaagagcgtcttcttgggacgcacatcggataagggagaatgacatgggaaagacagcatttttgttcccgggacagggagcacagtacatcggtatgggcagagatttttacgagcagattcccgtgagcagggacgtgtttgcggcggcatccgaggcgtccggtctggatattgcggcgctctgctttgaagaaaatgagaaaataaatatcaccgaatacacacagattggcatgctgaccgtggaggcggcgatccttcaggcgttgcttgcagaaggaagaacaccggatgtggcggcaggattaagtctcggagagtacggggcactgctggcaagcggcgtgatggagcagagggatgcgtttgcgcttgtgagaaagcgcggcatctacatgcaggaggcggtgccggccggcggcgcgatggcggcggtgttgggactggatgcggaaaaaatagagaagatctgtggacagactgctggcacggtatccattgcgaattacaactgcccgggacagatcgtgatcaccggggaggaagcggcagttgccgcggcaggcgaacagtgcaaagagagcggtgcgaagcgtgtggtgccgcttaaggtcagcggaccgtttcactcgcccatgctaaaagaggcgggagaaaagctgggagaggcgcttgcggcggtaacactccgggagataaagctgccgtatctggcgaatgtgacggcggactatgtccgggaggcggaggctgtgaagccactgctgaaacagcaggtgtgtgcaccggtacgctggcagcagtccgtggagcgtctgcttgcggatggtgtggatacgtttgtggagatcggcccgggtcatacactgagcggatttatgaaaaagatcttaaagcaggccgaagtcccggcagatactgtacaggtatacaatgtggaaaccatggatgacttcaaggaatatatgtcaaagtagaggagagagtcagatgctggaaggaaaggtagcgcttgtgaccggagcgggaagagggatcggcgcagcgatcgcagaaacacttgcaagggaaggtgcgtttgttgtcgtgaattaccgcggatcgggacaggcggcacaggaactggcggagaaaatcggcggagtcgccatgcagtgcgatgtggcggattttgaagcctgcgaaaacatgatcaaaacgatgatagagacgtatgggcatctcgatattttagtcaacaacgccggaatcacaagggacggtctgctgatgaagatgagcgaggcggattttgaagcggttctttcgacaaatctgaagggaacatttcacacgatacggcacgcgtcccgctattttttaaaacagcgttatggaagaattgtcaatatttcgtccgtgtccggtgtgatggggaatgccgggcaggcaaattacagtgcaagcaaggcgggggtgatcggactgacgaaaagtgtggcaagggaactggcgtcgcgggggatcacctgcaatgcggtggcacccggttttattgagaccgatatgacggatgccatgacagagagcgcaaaggaagccgttcaaaaacagattccactggggagatgcggaaatacaaaggatgtggcagaacttgtgacatttctggcatcagacaaggccgcgtatatcaccggtcaggtgatctctgtggacggcggcatgtgtatgtaagggagtagtaactgaaagaaagtgaggcaggtatgagaagacgggtcgtagtaaccggaatgggcgtgataacgccgatcgggaactctgtagaagaattttggaatgcggtgcgggaagaaaagacaggatttggggaaatcacgcattttgacgcatctggatataaatgccatctggcagcggaagtaaagaattttgacgggaaaaattatatggatcccaaggcggcaaaacgcatggaactgttctgccagtatgcggtggcggcaacgaaagaggccatcgcggatgccggacttgagatggagaaggaagatccgtatctggtgggaacagcgatcggaagcggcgtcggaagtctgcaggcgatcgagcgcgaatataagaagcttctggagaagggaccggggcgagtcaatccgcttctggtgccgatgatgatctccaacatggcagcaggcaacgtgtcgatccagtttggcttcaagggaaaaagcatcaacgatgtgacggcttgtgcgaccggtaccaacacgatcggcgaggcgttccggagcatccagtacggcgaggcagacgtcatgatcgcgggggggacggagggcagcatctgtccgatcggaattgcaggatttacggcgctgacggcactgtcgtccgagaccgatccgaagcgatgctccctgccgtttgataaggagcggagcggatttgtcatgggagagggcgcaggaatcgttgtgctggaggagttagagcatgcaaagcggcgcggagcgaagatttatgcggaggtagccggctacggatgttcctcggatgcctaccatattacatctccggcggaggacggtgcgggcgcggcgcgtgccatggaaaacgccatgaaggatgcgggggtaaaaccggatgggatcccatacatcaatgcgcacggaacagcgacacatctgaatgatctgtttgagacgcgcgcaatcaggcttgcgtttggggaacatgccacgaagcttaaaatcaattccacaaaatcgatgatcggacatctgctcggggctgcgggcgccgtggagtttgtaacctgcgtcaaggaaatgcaggaaaattatgtgcacgcgaccgtcggctaccagacaccggacgaggagctggatcttgactactgcagggaggcagtggcgatggaggtgccgtatgcactcagcaattccctcggattcggcgggcacaatgcgagtcttttgcttaagagatatggaggcgaggtgtgatggaactggacatcggacagatcatggagattcttccgcacagacagccgtttctgctgatcgatgcggtggaggaactggagcccggaaaacgcgcggtggcgcgaaaatgcgtcagctacaacgaaccttatttcggaggacatttcccgggggaaccggtgatgcccggggtactgattgtcgaggcactggcgcagaccggtgcggtggcgattttaagcatggaggagaaccgtggaaagaccgcgtattttgcggagattaaccgtgccagatttaagaaaaaggtggttccgggagatgtgctgaccctgacgacggagatcatccggcagaaaggaccgatcggcatcggcagtgcgacggcgtctgtgcgcggggaggttgtctgcacggcggagcttacgtttgcaatcggcagtaaggaggagtagaggaaaaatggcggctttgtttcagaagcggaaaaaagaaccggcagaaaaaacaccggtggaggcagcacaggcgctgcaggagacgattgtgtgcccggcctgcggcagggagatcaataaaaaggaagcggaaaaaaatctgtatgtctgctatgaatgtggcagttatttcagggtgcgcaccagaaaccgcatccgcatggtggcggatgccggaacgtttaccccgtggttcgaggatctggcggaggcgaatccgctggagttcccgggatatgaggacaaagtaaaagcggcaaaggaaaagaccggactgcatgaggcggtcaccattgggcactgtaaaatatacggcgaggatgcagtgctcggtatttgtgacgcaagatttctgatgagcagcatggggcatgtgatgggggagaaaattgcctgcgctgtggaacgcgcgacagaggaaggtctgccggtcatcctgttttgttgctccggtggcgccagaatgcaggaggggatcgtttccctgatgcagatggcaaaaacatctgcggcattgaagcggcattcggaagcggggctattgtatattccggtgctgacagacccgacgaccgggggcgtgacggcaagttttgccatgcttggagacatcatcctggcggagccgggggcactgatcggttttgcgggaccgcgcgtgattgagcagacgatcggggaaaagctgccggaaggttttcagcgggcacagtttcagctggagcacggatttgttgacaggattgtggagaggaaggagctaaagcttaccctgtaccgcatcttaaagctgcatcacaaaaaagaaggttatgccaatttcgatccggtgcgggaggcagactgcctcgaggcgacagaactgatgaaagagcgcgccacaaaggcgaaagcattgtccgcgtgggagaaggtcaaggcagcgagaaaggtggaccggctggcgtctgtagactacatagagcagatttttgacgaatttatggaattacatggagaccggcagttccgggacgatccggcgattgttggcggtgtggcgtatctggatggccagccagtcacagtgatcggtgtgcataagggaaaagatttaaaggaatgtatgcaccggaattatggaatgccgtcgccggagggatatcggaaagcactccggctgatgaagcaggcggaaaaatttaagcgtccggtcattacatttgtgaacacctccggcgccttctgcggcatggaggcggaggagcgcggacagggcgaggcgatcgcgagaaacctgtatgagatgtccggcttaaaggttccggttctttgcattatgatcggggaaggcggaagcggcggtgcgctggcactctctgttggaaatgaggtctggatgcttgagaatgcgacctacagcattttatcgccggaagggtttgcatcgattctctggaaggatggcagacgggcaaaagaagcgagtggcgtcatgaaaattaccgcgcaggatttaaaagcgctcggcgtgattgaggagatcataccggagtacggcatggcggatcagccggcactgatttccatatcgcgttacatgaagaggcatataaaaacatttttgaaaaaacagaacggaaaaaccggggatcagctcgctgcggagcgctatcagagattccgcgtgttttaaaaggaaggagacccgatatgaaggtaaagatcgtgggcaccggaagtgcagtccccgaaaaatgtgtgacgaacgatgatcttagtcaatggatggatacatcggatgagtggatcagaagccggacgggaattgagaccagacatctggctgtgagagagacaacgacagaaatggcagtggaggcggcgaagcgggcacttgcatctgcacatatggacgcggaggagctggatctgatcattgcggcgacgatcacgccggaccggctgctcccgaaccttgcctgcgaggtgcagagcgcactcggggcatgccgggcggtcgcctttgacgtcagtgccgcctgctcgggttttttatacgcgatggatattgcacgccactatctggaagccggcggaagccggcgggcgctggtaattggtgcggagacattgtcgcggatcatggactggagcgaccggagtacctgtgtgttgtttggggatggcgcaggtgcggcagtgctggaagcagatgaggcggaggagcatgcgggcatcttaagcaccgtgcttggaacggacggcgcgggcgggatggtattgcgctgtgacaaccgcagaaatcacaatccgtatgtgaagggcgacaccgcgctctcgtacgtgtccatgaacgggcaggaggtctataagtttgcggtgcgcacggtgccgaaagtaattgccggggcggtggaagaggcagggctttcgatggatgaaatcgattttttcctgctgcatcaggcgaaccttagaatcatcgaggcagtggcgaaacgcctgcatcagccgatggaaaaatttcccacaaatctgcagaagtatggaaatatttcctcggcgagcgtgccgattttacttgataatgtcaataatcatggtatgataggagaaggcagtaaaatagtactggcaggctttggagccggtcttacgtggggcgcagcagtgctccgctggcaggcggtgtaggcggtgtggtcgggaacagatactgctatgaacaggagtatgatacatgaccacggatgagacattgaacgaattactggtaaggctattcaaggatattatggagattgaggcgagatgtctggtgaatgaggaatttaaggacatcagctacaacgattttcatattatagaagccatcggattaaaggagccgaaaagcatgacggcggtggcaaagctgatggatgtcacgaccggtacgctgacgaaggcgatggatggcctgactgagaaggggtatgccgtaagagaacgcagcaagcaggacaaacgcgtggtgtgggtgtacttgacggacaaaggaaaagcggcatatgcgcatcacgaagagtttcaccgcaaaatgatcgccaacatcaagggacagctgaatgagcaggagacgccgattttgatctatacgctggcaaagctcgtggactattttcaagaggaatatggattggaggaggaatagacatatgagcagaggagcgttgggcaagaataactgggcgctgtttttaatgcttctggcaggaattatgctgggcggttttatcggaaatgctgctgcaggtgtttcgggacttagctggctgaattatgggcagagcttcggcttcgccagcccgattgtgctggatctgggcattctggtgatcacattcggattatcgatcaagattaccatcgccagcattatcggcgtgctgattgcgattattatttatcgtttgatttaagttcacaagaaatagaaaagcctcgggcaggggaaaactcctgcccgaggctttttgcgtatgtctgatgcggggacataaatcgttccggggacactatcctgctacaaagctttaacaatttagcggaataaagaaaaaaagattgcacatgaaaacattttatactaaaatgtatctgacgaaaatattgcagtgtatacacagcacaatatactaagagtaaggagacaaaaaaatgggatatgtagatgaagttcttgcaaaagtaaaagagaaaaatgcttccgagccagagttccttcaggcagttgaagaggtgctggagtctttaagaccggtgattgaggcaaatgaggaactgtataaaaagaatgcgattttagagcgcattacagagccggatcgtcaggtaatgttccgtgttccgtgggtagatgacaatggacaggttcaggtaaacagaggtttccgtgtacagttcaacaatgccattggaccatacaagggaggattaagacttcatccttctgtaaacttaagcatcatcaaattcttaggatttgagcaggtatttaagaattcacttacaacacttccgatcggcggcggcaagggtggttccgattttgacccgaagggcaagtctgacagagagatcatggcattctgccagagcttcatgacagagctttacaaatatatcggtgcagataccgacgtacctgccggagatatcggaacaggtgcaagagagatcggtttcttattcggccagtacaagagaatccgcggattatacgagggagttctcacgggtaagggacttacatacggcggttctctcgcacgtacacaggcaaccggatatggtctgttatacctgaccaacgcattgctgaaggatcacggcatcgacatcgcaggcaagacctgtgcagtttccggttccggtaatgttgcaatctatgcgattgaaaaagcacatcagttaggagcaaaggttgtgacctgctctgactctaccgggtggatctatgatccggaaggaatcgatgttgcattattaaaagaagtaaaagaggtaaaacgtgcgcgtcttaccgagtacgcggcagcaagaccttctgcagaatatcatgcaaagcagaatggtgagcacggtgtatggcagtacaaggtagatctggcacttccgtgtgcaacacagaacgagcttgacatcgaggatgcgaagatgctggttgcaaacggcgttacatctgttacagagggtgcgaacatgcctaccacactggaagctaccaaatatcttcaggcaaacggcgtattattcgtaggcggtaaagctgccaatgccggtggtgttgctacttccgcactggagatgagccagaactccgagagactttcctggacattcgaggaagtggacggaaagctcaagggcatcatggagaccatctacgcaaacatttcagatgctgcaaagagatacaatgcaaccgttggcggacagacagactacgttgcaggtgccaatattgccggatttgagaaggttgtagatgctatgctcgctcagggtgtttgctaatcgagaatttctaagataatataagatatggttaagtcctgtaaacaaatcaaatcttcgatttgactggtgtttatgggacttttctttatgcatatataagacatgtgaatggtgagaatattgataaatggaagggatattattaaaaaatttgaagctgtagaattttacgttgaattttacagcttaatttcgtataatatatgtaaataaagaaacgatatccaggaaaggaagttgattttatgccgaatatattacctgtatcagacttaagaaattataatgaagtgttgaaaaattgccaagtcggagaacctgtgtttttgaccaaaaatggcagaggaaagtttgtggttatggatattgaggactatgagcgtgagaaggcagagaaaaagctgttgatgaagctacaggaagcagaagaagcagttaaggatgaaagtgcctggatgagtttggatgaactgaagaaatctgtcggggtatagcctatgatgaaattacggattaattctattgtggcagaggacttaaagaaaatgaaagagtatattgcggaagacaatgaagaaatggcagtaaagaccattcaggagatatatgctcgaattgagaatatacagcaacttccgtatatgggagctgatcttgctaaaagggtcagcttccggacggattataaatatgtgatttgtgggaattatgttgtgctgtataagattggaaaagagtatgtggagatttaccgggtggtgaatcggcatcaggacattacgaagatattttaaattaaactgaagaaaatgatggaataacaagcaaaagtaaaaataaaaatgcctaccttcgtacctgactggtggaaggtaggcatttaattaccatagtaattatgcgtaatatacaaaacgctatgaaagctttatttttaggtggttcttctatccttacaccatctctttttccccgatcttattcacgatcgtcctaaaaatccggaacatgaagaggatcgtcatgataatggagatcagctctgcgatcgggaatgcccaccagatcaggttgacattgccgaactgcgccagaaaataagcaaccggcagcagtgcaaccagctgtcttgcgatcgagacaaacatactgtagactgctttgccgagcgcctggaaaatgctgctgcaggagatgccgaatcctgcaaggataaagcttaagctgataatccggagcgccgggacgccgagagaaagcatggtgtcggaagcgctgaacattttaagcagctgcgttgggaagagctggaagatcagaagtccgaccgccatgatgcagacggcataggtgaccgtgtggcgtaaggtcttgaccacgcgctcgcggctgccggcgccgtagttgtatgccatgaccgggatgacaccgttgttcagaccaaacgcaggcataaacacgaagctctgtaatttaaagtaaacgccgaacactgccgttgccgtggaggagaaactgatcagaatacggttcataccgtaattcatgaccgaaccgatcgcctgcatgacaatggaaggcacgccgatggcatagatctgaccgatgatggtgccgtccgggcgaaagccttttaaactcagctgaatctccttatttctggtctggttgatgacgacagcgagaaccgcagcaatcatctgaccgatgacggtggcggctgcagcaccggtgatgcccattttcggaaaaccaaacagaccaaagatcaggattggatctaagatgatgttgatgaccgctccggtggtctgggtaatcatggtgtagacggtttttccggttgcctgcagcatacgctcgaacatcagctgggtaaagcagccgaaggacaggcagcagcatacggtgagatactgctttccgtagagaacaatttcctcaatatccgtctggctgcggaaaaaaggttccgcgaaaaacagaccgatgataaggaacagcagatagctgagcaataccagaaaaacagcgttttccgcaatcttgttgactttgtcgaaatccctctctccgagtgagcgggcgagaagcgcattgacgccgaccgcagtacctacacctacggcaatcatcagattctggatcgggaaagccatggatacggcagtgagtgcattttcactgatctgcgccacaaagatactgtccacgatattatagagagcctgaaccagcatcgagatcatgatgggaagtgacatggatatgatcaatttatcgataggcattgtgcccattttattttcctgcatgggaaacctcctttgttgaatggtatagcgtaaaacgacctttctatactaccattttgcggcagcgattacaaggcatggtgcaaggattggggaatcttttgtgaaacggtggcactgtgccgcaatttttggtaaaatagatgagaaaaaaagaacaacaggagattatacagatcatgaatatattattttttctgaccccgaaggaagacgtggcgcatgtggatgaggacgataccatgcgtcaggttctggagaagatggagcatcacggctatacggcaatcccgctgcttagccgcgagggaaaatatatcggaacgatcacggagggcgatctgctctggtttttaaaggaccgcaattttccggatttgaagctgcttgaggatatgccgatcacctccatccagcgccgcagggacaatgaggcagtcaagattgacgagtcgatggaggatctcttcggcaaggtgatgaaccagaacttcgttcccgtcgtggacgataagcgcgtgtttatcggtattgtgacgagaaaagatattctggcataccttggaaaaaaagccgccgcgcaggagaacggtgcgcggggcatggatcaggcatagtgatggtaagccatacggattatgtgacagagctttctgtcagaattatcagcaaataagcgagacagaacaaaagaatttcttaaatttgttatttttttcacaaaacagaatggtaatccgctataatatgaaggagagacaaggcataacatttatacaaaagaaaggggaatttacaaatgaattcaattttatcagcgacagtattgattccactgattgtgatcgtgctgctcatcgtactgctgtgcgtcggatacgtgaaagcaccaccggatatggcgtacattatttccggtgtcaagaagaagtccaaggtggtcatcggaaaagcgagcattcgcattccgttttttgagcgtctggataagctgaacctgcggctgattccgatcgatgtcaagacgagcaatgccgtgccgacagcggattacatcaatatcaatgtcgatgcgaccgtcaacatcaagatcagcaacgatccggagaagctgcggcttgcggcagagaacttcttaaataaaaacaccgagtatattgccggggtggcaagagaggttctcgagggtaatgtgcgtgagatcgtcggtaagatgaagctcgaggagatggtatccgaccgccagaagtttgccaacctggtcaaggaaaatgcggagccggatcttgcggcgatgggactcgacatcatcagctttaatgtccagaatttcgtggacggcaatgaggtcattgaaaatctgggtattgacaacattgtaaagatcaagaagagtgcggcgattgcccgtgccgagagtgagagggacatcaaggttgcacaggcagcggcggacaaagagtccaatgatgcagcggttgcggcgcagacggagatcgcgaagaagcagaatgagcttgccatcaagaagtccgaacttcagatggaggcggacacgaagaaggctatggccgatgcggcttacgagatccagaaagaggagcagcgtaagacgatcgaggtgacaaccgccaacgcggatattgcaaagcaggagcgtgagatcgagctgaagcagaaagaggttgcagtcaaggagcagtctctggaggcggagatcaagaaacaggcggaagcggataagtatgcggcgcagcagcgcgcggaggcagaactctaccagcgccagaaggacgcggaggcgagacagttcgaggcacagcgcgaggcggaggcgagaaaagcgcaggcagaggcagagcgttacgccaaggaacaggaggctgccggtatccgtgcggtcggtgaggcagaggcatctgcgatccaggccaaaggtattgcagaggcggaagcgatggagaagaaagcggaggcgtacgcaaagtacaataaagcggcagtggcagagatgatgatcaaggtacttccggacatcgcagccaaagtggcagagccgctcggtcagatcgacaagatcacgattatcggcggcggagaaggtggaaacggtgtggatcaggttgccggcaatgtgccggttgtcatggcaaaagtatttgagagcatgaaagaggctaccggtattgatctggcagacatcatcaacgcagagtcctacgatgcacaggtgaaccgcaacatcaatgtgtcgggactggattccgtgaatcttgtggtaaaagatgaaaagaaaggcgcagaacagccggatgcgcaggacggggcaacgatagagtgatgacggtggaagttggcgtcaaccgcagagcgggaacggggcagtctgttacggcggcagtttttatcgtgatggcggcaggatcgatagcggtgatcccgctgcttgcagcaaaccttgaccgtagagcactcgggattgcggcgtgtgttctcacattagttttctgggtcgggtttatcggggcaatctgctgcgtgggggagattgtaaatacgccgaccagggcgttccttctcaccagtgactggcagttgtattatgttcattttgcagcccgcgactacggacctgcaccggtgacaaaagccggggagatcgtacataattacaaggtgctctccgaggagaaaaaaggacggaaatggcgccgggagtatctgggcagcgaggagttccgcagcatggcgcagcagtacctcgagggagtgcggacggatacgatggggtgcgtgatcgagcatcttcagacgccctctatccgttccgaaggcatcgacggaagtgtgctgcgctactgggatgacacccggaaaaagtgggcaacgatccggcttttaagaacaaataccggatatgagaaaatctgccgtacggtaaagctccgccaggagctcggacgctaagaacatctataaaaacgggactgccgcataaagcggacagtcccgtttgacgtgataagtaatataaggaggaagatcatcctatcgatttcagatggaaatgtagatggaacattcgttgaaaaaaatgcgcgcatttcttcctgccggatttttgcatcgaattccgtgtctcttccacgttttgacaatccacggaatgtgtccgacaaaccgcagacaatgagcggattccctagtgtccctagcggcactgcttcacagacaatataaaaccgcgcgaaccgaactcgccgtcatctgctattgaagttaaggcagatgacggctcaaacagcggcttcgcgcggttatgttttattcagcagtgccacaagggacacacgagaatcctaaaattgtctgcgggttgcggacacgcccgtggagtgttcaaaacttggaaaaacacggatcatcggagatgcaaaaaccggctggttagaaatgccacatttttgatccgaatttccagatgcattccatctgaaatcgaaggacatggtcattcttcatactacttaccacatcaaacaggactggctgtttgatgcgacagtcccgttttgtatggaagagaaaagattactgtgtatttttctgcagttcattggcattttcctgaagctgctgcatgatcagggcaatgtcgtccacgctttgcagattggtgcggcagccggcaaggggcgcaccagcgcttgcggtaacttcctgtgtcagggcggatacattttcgatgctctggataatctggctgttggaatcagataccgcatccacaccctgctttaactcggacatgccggaggtaatgcttgcggtatttttctcaatgagatcaaaatatccggcagcggaagtaatgtattcactctggtgcctgttgctgtcgaacagttcagtgacggagtcggtaacggaggaaatggactgcgagatgtgctcaatcaactgattgatatctcccgtagcaccattggtctgaccggcaaggctggaaatctcctcggcgacaacggcaaaaccgcgtccggcttcaccggcgcgtgctgcctcaatgctggcattgagcgctaaaaggcttgtctgggaagcaacactgctgattaaggcaacgatgctctgcattttgtcagcatattccttcagctcttccatagaatccgcgacgcgtgtactggaagcctctgagacctgtacctgctgcacaagattcttcataacatctttgcttgccgtcagattggcagaggtctctgcggtggaggagagaagttcggcagtgacggatgatacgttctgtacctgctggtcaatgttttctgtctgctgttgctgcacctggatggcagcggcggtctcggaagtgccgctggtaagatcctccatggcggtctgcgtgccggcgatggaatctcgaagctgtgaggtgctgtgtgaaacctgatcgatatttcctgccatatctccggcaacctttaaggtcagctgcagaagatcatcggactggctgcggtcagagtcagcctttttgatgttggcatcgttgatctgcgcaatctttgtgacagacatcaatacaaaaatataggaaaggataatgcaggcgattataatctcggcattggtaatctgggcagcggtgaaaccctgtgtaacggcacgaaagaccagaacaaggatattgatcaccagtgcataagtacacagcagggaaacgagctttttatctgcatacaccagaagaatcaacagcattacgattacatagcagaacgtcagatctgttgatgaggtaaacatcacataggcatacagaagggcaaagccgccgccgcagagatagcgcacactagaggtatccttctgctttgtgtaggcaagaatggatgtgacacagggcagcagacagagcagaagaaaaatcagatacgacggaagactgcgcacgccttttaagacttctgcgatgtaggccgccgcaagtaccgtattcattgtgcaggtgccggcaatggctgtcttattgcggctttgtgctgcaactgccggatgggaaagatcggtcaaacgattatccatagaaagaatcctcctttgtaaataccgtattactctaaatgtaaaaaaggcaccggtgcatcttgtgcaccgatgcctttttcctgctattattgtaacagtttggcggatgttcataaagtagatgtaagaggaacaggactattttaccagattttctgcataatccagagcttctacgatatttgcatggaaattttgggctccgacgtactcggtaaagccatctttgaccattacggacatcggctgttcgttgacgtgggagaaaaccagtgtaatctttttcttttttgcacggtcggccagttcgcgcagtgatttcatggcactggcgtcgatggcagggacgctgcgcatgcggatgacaatcacgcgggtagccttgtcactgttgatctgtaagatctggtctgcggcggcgaaaaacagcggaccactgatctcgaagacacggatggtgtgaggaatatcgcgcagtttttccgcttcgcccggggtaacgtccggctcatccagatatttccatgcggtcacatcggcggtttctgccatacgcttcatgaaaagcatggcggcgagcacaacgccgacttcaatcgcgatcacaagatcgaaaaatacggtgagcaggaaagttgccaccagcacaatgacatcgctttttggcgctgttttgcagagacggaaaaaggaagtccagtctgccatgttggcagccacaatcagaagaacagcggcaagcgttgtcatcgggatcaaagcggcaagcggcatgagcaccagaaggataatggttaaggtgatacagtgcacgatgccggcgaccggggtgcggccgccgttgcggacgttggctgcggtacgggcgatcgcaccggttgccgggataccgccgaaaataccggaaaaaatatttccgagtccctgaccgaccagctcggcgttggatttgtgggtatcaccgatcattccgtccgagacgacagcggacagcagggattcgatgcctgccagcagcgcgatggtaaatgccggtgagagcatttcctgcaccagtttcatggacagtgccggaacatgcggtgtcgggaaggaggaagaaagctctccgtagacactgccgattgtgttgaccgggagatccgcgaagtagacaacggcggtcgtgacaataatcgcaatcagagatcccggaatcttgtcggtgactttcggccagagcagcatgatgacaatagctgcagcgcccacagcggtggcagtccagttgatggtggaaatatttgtggcgtaggcaatgaccttatccacgaacccggacggcacggatgcgatggagagtccgaagaaatccttgagctggccgacaaacagggtcacagcgataccgcaggtaaaaccggttgtgatggtataaggaatatatttaatgagagaaccaaagtggcagattcccattacgatcagaaaaatgccggcaagaatggttgcgacagtaaggcctgccgtgccataatccgtgacaatgccatagatgatgactacaaaggctgccgtaggaccaccgatctgcacacggctgccgccgaaaaacgagataaaaaatccagcgatgatggcagtatagagcccctgctccggcccgacgccggatgcgatggcaagcgcgatcgacagtggcagggcaatgatggcaacgatgataccggagatcacgtcgcgcatggcctgttctttgctgtagtcctttaagacgtcaaatagttttggtttcaattcattcattttcatttcctcagtctgtaattattaaatttttataaacacaagtcaaaattttagcactttacaaacgcgaacgcaagaacgcacgggaaaaaatacaagcacatggaaaggtgagcaaaactgggaaaaatggaagacattttacaggaaaaagaagatgtgaaaagccggattgtatgttaagatagatgataataaatgatataggaagaaaggcggcaatcatggcggagtcgggcaattcttatcagaagatctatgaaatcgtaaagcagattccaaagggatgtgtggcatcttacggacaggtggcggcgcttgcagggaatcccagatgggcaagagtggttggctacgcgcttcacgtgaacccggatccagcgcatattccctgttaccgtgtggtgaaccgggaaggcagactttcggatgcctttgcatttggcggtgtgaatgagcagaagctgctgctggaggcagagggcgtcgaagtaactgacggctatgtggatatggaactgtatcagtggaagaagctccggatctgagagacggaaacggaaccgatacaggaagagaaagcagagacagaaacagaaagcaaagacagaaacggaaaaacgagatagaaacggaaagcagagacggaaacggaaccgaaacaggaacggaggagaaatatgcggaaaaaggaactggcacttcaggtgatagagcgcttgaaaaaggagtatccggacacgggatgctcgctggattatgacgatgcatggaagcttctggtcagtgtgagactggcggcacagtgtacggatgcaagagtcaatgtggtcgtgcaggatctgtaccgggaattcccggatgtggatgcacttgcggatgcagatgtggaggagattgagcgcgttgtaaaaccgtgcgggctgggacacagcaaggcgcgcgacatctccgcctgcatgaagatgctgaaggaaaagtaccagggaaaggtaccggaagattttgatgcgctgttagaacttccgggagttggcagaaaaagcgccaatctggtgatgggggacgtctttggacagccggcgatcgtcactgatacgcactgtatccgcctggcgaaccgcatcgggctcgtggacgggattagggaaccaaagaaagtggagatggcactctggaagctgattccgccggaggagagcaatgatttctgccacaggcttgtggatcacgggcgtgcagtctgtaccgcgcggacagcaccgtactgcgaccgctgctgtctcaatgacatctgcaaaaaggccggaatttagaaaaagataaaataaatcaatatatttgattaaaaacgcaccttgcggaagcataaggggtatgatagtatatacgaaatgaataacagaaatcaactttcttgaattattttgtatggaggaaagacatgaatattgcagcaaaatacggaaaatcatactttatgccgccggaggtgacatatgactgggtgaagaaggacagcattgagaagccgcccatctggtgcagcgtggatctgcgggatggtaatcaggcgctgattgagccgatgggactggaggaaaagcttgaatttttccggatgctggtcgacatcggatttaaggagatcgaggtcggtttcccggcagcttcggacacggaatacaatttcatgcgtgcgttaatcgagcgcgacatgatcccgaaggatgtgacggtgcaggttttaacccaggcaagagaacatattataaggaagacatttgaggcggtcaagggagcgcctcacgcagtcattcatctgtacaattccacttcggtggcacagcgggaacaggtgtttaagaagagcaaggaagaagtcaggcagctggcagtggacggggctgaattgttaaagacactcgcggcggagacggacggcaattttacgtttgagtacagtccggaaagcttcccgggcacagaggtggactatgcggtggaggtctgcaatgcagtgctcgatgtctggaagccggatgcagagcacaaggcaatcatcaacattcctactacggtacagattgcgatgccgcatgtatttgcctgccagatcgagtatattcacaagcatttgaaatacagggataatgtggtgttgagcgttcacccgcacaatgacagaggatgcggcatcagcgatgcggagttcggtatccttgccggtgcggaccgcgtggagggcacgctgttcggaaacggagagcgcaccggaaacgttgatattgtgacgctggcgatgaatatggtgtgccacggtgtcgatccgaagcttgatttttccaatatcagcgagatccgcgagaaatacgagcgctttaccggtatgcgggtttacgagcgtacaccgtatgccggagatctggtatttaccgcattttccggttcccatcaggatgccatctccaagggtatggcgtggagagaagcgggcaagagcggcgaccgctgggatgtgccgtacctgccgctggatccgaaggatgtcggaagggaatacgagtcggatgtcatccgcatcaacagccagtccggcaagggcggagtcgcattcgtattaaagcagaacttcggtatggatctgccggataagatgaaggaagaagtcggttatctggtcaagggtgtatcggatagcagacatcaggaactctctccggaagcaatttaccggatttttgaagaacattatgtcaacctgtgcgatgtttttcagatttcagagtgtcatttcgagcagaaggacggcatcacatcacgcctggtgatcgagcacaacaaggagcgccgcacgattgagacgacaggaaacggccgcctggacgccgtgagcaacgcaatcaagatgtatttcggcatcagctacgagcttgccgtatacgaggagcacgccatttcagaaggatcatcatccaaggcggcggcgtatgtggagatcatctgcaagggcaagaattactggggcgtcggaattgacgaagatatcatcaccagctcgatcgcggcattggtatccgctgccaacaagatgttaaagagtgagaacattgtggagggacgcgaggagcggatcgtcgacatcatgaattacatacagaatcactatgcggatgtgacgctggatgtgctggcagatcagtttaacctctccaaaccgtacctttccaaatacattaaggaaaagtctgggatgaccttccaggatgcggtgaagaaagcacgcatgaaaaaagcacgcactatgttaaaggagacgaaccagacggtagagtcgattgccgcctacgtgggttacgagaatgtggagcattttaaccggctgttcaaaaaagcgtatgagatgacgccggtgcagtttcgcagaaaatatcagtaattctcaaagaatagaatgacaactgggaacagggggaaagtattgtggtactttttccctgcttttttactgacagacagaaacaataatggtataataggagaatcttaggtaaggaggatgcatgatggaagagtttaaacagcttgaaatctacctgtttcctatagtgatgctccttgccatcggaatgaataactggaagcgggaggaacggacgcagggagaccggattttcgggtttcttccgtttctgattatctgcatgatgggcagtgatgtgacgtatcatgcactgcagctttatgtacatcggtttacggtgctgtatgccgggtatctggtgtactgcttctttttgacagcagtaccgtatgcctggcttttgtatgtgaacggaaagctttctgcgcggcataaccggcggtggacggctgcggtatgccatgttatgacgggaattgctatcgttgcggtgctgcttacagtgatcattccctggagcttgagcacggagggatggggtgcgcatgcggtatcctatagcttaaatcacggcagtctgccggcaaagctggtaagtatcgtgctgtatctgatggggcttattctggcggcgacggcgtatccgaaggaggttaccaaggaaggtcagaaagagacgcgctatttgcttgaggcaggcgtgttcagccttgtgggcggaatggtgcagagctttgcggaggactggcacacgggagggccttttgtggcactggcagtgctgtttatttatctgaatgcgcagaaccggcagatcacgacagacggactgaccggactgaataaccgcagggagtttgatgcacatctgcagcggaagatcgaactgtgcccggagcacgagtggggacttctgatgattgatgtggatgatttcaagcggatcaacgatgaactgggacatgcggtgggcgatgaggcgctctggcatacagcggatattctgcggggggtgttcggcaaagatccggtatttctcgcacgctatggaggggatgagtttgcggtgctcggagactggtttgggcaggaacagattgaggaagcgatcgcgcggatccaggaaggtatcgaccggtttaacaaagagggacagcttccgctgcagctgtccatgagtatcggctacgcgttctggcatgaagccggaaggcgcggggagaacctgatacagcaggcggatgagcggatgtatgaggagaaacagaaaaagaaacgtatgcgcgcatagagcgcggtgcatggggaggcggactgcgtgagtacggcagcatttttacagatcaatttcataccggcgattgcgctgctcatgatgcgccataataccaggcagacgctgtctttttcgtggaggacacgcgtgctacgcacggagatgctgctgtttgtactgcttttactgtgccgcacagcgattttgtgcaatctcggaaaaggcggatttggtccaaggattttgttaaaggggctgggggtgtggtatgcgttcggccttctggcatgcgcctacctgtgctttttgtatgtgctggatgtggcgcaggacggaaacggacagagagggataaaatgctggattctggcgataccggcactgatcggcagtgctgtgctgctctcaaacccgtggacgaaggcggtctattttatcaatatggtgaactactataaaaagggaccggcgtcatatctgatacctgctgtgggcatgttataccttgtggtggcatttcttcttgccgcgtttggtgcgctccgtgccggaagtgcgcagcgcaggggagaactggggaagcttgccgccgcttttttgttccctgctgcgggcattctggtagaaaaaatattttccatggatgccgcgtgggcgtttacggttgctgcattgctgtgggtgtatcttggtattcagaaaggtcaggtaacgcaggatggtctgaccggtctcaacaacagacgcagactggatcagtacatgtgggaacttgacgagcgcagcggagagcgggagacctgctgctatctgctgatggatgtgaacaagttcaagaaagtaaacgatacctacggtcacgtgaccggcgacgaggtgctcaggctggtggcggagcagttaaagcgcacctttggcaatatgcaggcgtttctggcacgctacggcggggatgaattcgttgtgattgtaaaaggtaagacgcaggacgagatggacgtgattattcatcagacacaggagaatgtaaatgcaattgcctggggagcggataccccgtggcagctgtcgatcagtatcggctgcgcgatgcggggagagcaggggaagcaaaaaagccatgaactgctggcgcttgcggatgagcgcatgtaccgccagaaaaaaggtatacaggacagataatccgggcatactctcttcatacgttccgatgggagcagaagacggagggttagtgcaatgaaggatggagaagtgagagactttggcaggcgggataagattggctacatgttcggtgactttggcaacgattttacctttatttttgccagctcgtttctgatggtattctataccaaggtgctcggtatcagcggcggaatggtggggacactgtttctggtcgcacgatttgtggatgcattcacggatgtgacgatgggacgcatcgtcgacgcagcgccgccggcgcgggatggaaagttccgctgctggatccgcaggatgtgcggaccggtggcgttgtcgagttttttgatgtaccagactgccatggcgcaggcatctatgccgtggaagattgtctacatgtatgttacttatcttttgtggggaagtattttttatacatcgatcaacattccgtatggttcgatggcatctgcgatcacgacggaggcatcggagcggacggcgttatctacctcccggtcgattggggcgacactggcggggcttgtgatcggcatcgtgacgccgctttttctgtacacgaccgatgcagacggcaatcaggtcgtgcgcggcggcggaacatttacggtggttgcgggcattttctcgattctcgcgttactctgctatctggtctgttaccgcatgactacggaacgggtggcggtggagcgtgacgtggacgcggaatctgtgagttttgcggcaacgctcggtgcgattgcgaggagccgtgcgcttctcggaatgattggagccgcggtatttctgctgctctcccagctgttaatcagcacgatgaacaattatatttatccggattacttcggggatgcccgcggcatctcgctgttcacgctgctgtccacactggtgattctgctggtggtagcgccgctcggtgtgcctgtttccagacgatttgggaaaaaggaggcgtccgtggcggggatgctgttctccggtgttgtatttgcagtcatgtatgtgctgaaattacagaatatgtggctgtttctgtggctcggggcaatcggatatctcgggcttggcttttttaatacagtgatctgggcgaatatcacggatgtcatcgatgatcaggaagtgcagaccgggcaccgggatgacggaaccgtctatgcggtatattcgtttgccagaaaggtcggacaggcgctggcaggaggcatcggaggatgggcgctgcaggtgatcgggtatgagccggctgcggcggcgcagacggatgtggtgcggcgtggattgtacaccacagcaacgctggtgcctgcgatcggattttttgttgtggcagcgattctgtggtttgtgtacccgctggataagcggcgcgtggagaaaaacgtggaggaactcaagaaaaaacatctgcccgctgagcactgactggtgcggcgggcagatgttttttctctgccggggattactcgatttcgatgacgctcaccgggcagccgtcagcggcttcctgcgtggcatcttcctgttccggcgtcggctgatgatagacctccgatacattttcatcgttcatccggaagacctccggacatacactggcacacagcccgcagctgatacagccttcgatcacatttgctttcatagggcatcctttctgtgaacctcccgggggaggtgaatgatggttacctgtttagggttgccggtgtaaacgcgtcatatacgaaaaagccgttaagaaaccgctaagaaattaagaaaaagatgattttacaaatacaagtttgatataaaaagaatatatgttacaataattagcaaatgcggaaaggatggtgggagaaatggcgaacagcaaaagacataagttggtatgctgtctgatggcgatggctctcctgctgtcttttttttatgtggtaccggatccggcaggcaaggcggagcgtggtgatgcaacagcctgcgtggcagacgggcaggctgctctgacgggagagatgaggcacgaaggttcctggcagaatatgatgtctgcacagacgctgctggaagcaagggacgcaaatccggatgcctgcacagatacgttcacgatgattcattccgtgctggatgaagtcgtcatgcgggagcaggcgggcatgcgcagcctgctgtccaaactgctggcggtggttgtgtgggtgatgcttctggtatgcgttgtctgccggattctaagccgccgttacggatgtcgcatgatttaccattgggagaatatctattatatacaccagacagatggaaagaaaggagattgctttctgaattacttacatatatagaaaaacgtaatgacaggaggcagtttcagtgaactataaaaaccaaataagtgacagagtaaagattttgctgattgatgaggatgaaagtattttttatctgatccgcagggtgctgctgcgggagaactataggctttatacttccaccagcggacgctccggcatggagatgagcaccagtatctgcccggatctgattctgatggatacccagctttccgatatggacgggattggtctgatccagtggttcagagagtggacggattgtccgattctcgttgtatccggacagacgggatatatggataaagtcaatgccctgtatgcgggagcggacgactacattgtcaagccgtttcatgagcaggagcttgcggcgagaatttacaccgcgctgcgcagaaggattccgggaggacagggaagcttttatcaggcaggagatctgaagattgatttttcaagacgacaggtaagccttgccggggaggagattcatttttcgccagtggaataccggattctggagtgtcttgccctcaattcgggaactgtggtgacgtatcagatgttgttagagaagatatggggaccgtatgcaagcagcggcagccgtattctgcgggtcaatatgacaaatatccgcaagaagatagagaagatcccgatggatccgacgtacattaccacgatcccgcgtgtgggctaccgcatgcttgagagtcagacggcatcggttgtctgagctgaggttgaagcggaagctttggatgatgaagtgcctttgccttcaaaataggaatcatagattccgtagataaaacctccgataatgataagaataccgatcacagaaaaaatgtgttcaaagattgtcatataaaatccccctttggtttcagttgtcatcaagtataacagccaggaaaacggagggggattttgccgcttttttttaattttttcatagtgtaccaggaagagacttaacacttttttagcagcgggagccgggcagaggcaatattgtatgttttttgaacaaaatggctatattttgttaaataaagcactttttcgtagaaatatatggcaatatttgtgttttttgctataataagggtaatatgttaagaaacagggagaaggttatcaatatgaaaaaggggaagaagcaggcaaagcgaagaaacgcgaatgttacgatggcatttggaatccgggagaagatcgtgctgtgttttcttgtgccggttttgtttatgattgtgcttggaattatttcctaccgcaaggcggcggacggaatgagcagttcctatcgcgattccacgcagcagacgatcgagatggcgttgcagaatatcgatacgagcaactcgttcatcagtgcagaggcattaaaatacgtggtggattcggatcttggaaagtattttgtggggatttacgacaatgatccgacgtccaagcggacgttgattgaccaggtgaagacaagaattcttgcttcccaggttggcaactcctatatcagcaacatctatattattccttccggcgatctgcagatgatctcgacgaagaacaaggcgcagaagggcatttaccaggagtacatggatgagatggcggttgatggcaagctggaacagtgggatgaccatcacaatgcgctggatgagtatctgagcatcgactcgtccagatacattatggtatatcaggcaaccgcgcagaacggtaaggcggttatcgtaatcgacatcaaggcggaggcagtcacagagttcatgcagggactgaatctgggagacggaagcattgtgggattcgtgacggcaggcggcagagagcttgcagtgaagcgcaatgcgggagacgaacagggaactccggtcgagggagagacgatttttgcagacaaggatttttatctgcaggcgagtgagacggacggcgtaagacaggtgcagtacaacggaacagattatctgtttttccacagcaagagtgaggataccggggcaacgatgtgtgcgctggtgccgttgaaggtcattaccggacaggcagagtccattaagcagatcacgatagcgggagttctgatctccagtatcattgcacttttgatcggaactgcagtgacaagcggaatccgcaagaatatgaagcgtatttccggaagccttgaggttgtggcggaaggtaatctggcaacgaccgtgtccgtgaagggacgcgacgagttccgcggacttgctgctgcggcaaatgacatgatcgcacacaacaagcagctggtgcagaaggtcagtcaggcgacggataagctggcggcatctgccggtgaagtgacgaatgcatccggtattatccaggaatattcgcaggatatagcaaacgcgatcggtgagatcaacgagggcatggagcggcagtccacacatgcgcaggagtgcgtgagcaagacgggaacgctttccgaggagattcaggaagtcaaccgtgtggcgcgcgaggtagagacgcttgtgtctgaggcggaggagatgatccgcaaaggtatggaccggatcgaacagctgggacagcgcgcgaatgagacgacagctgtgactgcgaaggtggaagaaagcatcgaagacttgaagcgcgaatcggagacgatcaatcagtttgtttctgtcattacagatatttcggagcagacgaacctgttatcgctcaatgcatcgattgaggcggcaagagccggagaggcaggacgcggatttgcggttgtagccgaggagatccgtaagcttgcagacaattcggcggaggctgccggagagatccgcaataatgtggagaatatcagtgcgcagaccggcgtgagcgtcgagagcgcaaagcaggcgggcgagatggttgcacagcagaccgaagcagtgcgtgaggttatcggtgtattccaggatatgagcgatgccatggataagctgtttgacggattaaaggagattcttgccggaacggagcgtgccgataaggagcgcgaggatacgcttgaggcagtacataatatttcttctatcattgaggagacggcagcaagcgccgaagtggtgaagaaggttgccgcaagtctggagcagaatgtagagaacttaaacggcacggcggagagcctgggagataatatgacaggtcttaagaccgagatcgccgtatttaagacagaataggtgaagaacatttagagaatataatagaagataaaaaagcggcagccagtcgatcatgagatcggctggctgccgcttcttgaacgcagagagaactgcattttataaagcaaaatttgcaggggtcacactgcatcagaacgcgcaatcagaggttcaggcaggaaagattaagcagaaactgccggtgcagcagctctctggagagtacagcagactgaaaggagtcaagcgcaagctgatagacattcgcatactgtacatagtgccagtgaagttccgtctgccagttgtcgagtgtgatcaggcggtcttcatccagatgaaaatcaaacagatggctgcgcagctcgtaaagggcggcatagcggaacaggttggcgagcatatggcatgccttatctgtgtcagcgatggcaggcagacgcacgctgccatagcgcttaagccctgcaaaccgggagccggttccggaaaggttctgggcgatctcggtctcgagaagtgtgccaaaatcggtgttgtagtagtttaaggtggcagcgaccagggtatccgtcaactggacaaaggacggatggtgcagacagtcatgctgctcaaaatactcgtccataaagtcatagagaacaaaagactcgcagctgaagtgatattccggacggtatgcatttaaaaactgcggcagcaaaacagccagtgcgtccgtgtgatgcatcaggcacaggcagagtgctgcgtagaagttccggcagtccacgagcagggcatccagcggcagattgccgtctgcgtaaggcaggctggcagcctctggcgcatgatcttctatcagagagtcgataaccggtgtggtggtgccgaaaggaacccctgcagtcagcacaatggcggcatacagataaaacggttcaaagccgtccgctgcgatggaaggcgagaaatagtcgtctgcagagagataatcctccagtatctcaaagctgtcctcggccgacgggcaggaaacctgatctgcgaggaattgtgcgagatccggctgctcttctgccacgcaggatagaaaacgaaagagcgagtaggtgagaacacgctgtctgccggcaggctccttcgtgtagtttacaagaaatgcggggggaaataattgatcgttataagtttccatgaagaactccttttccaaaagtaatccgtatgtgtgtgcggatggatgcccgcagcgcataccgacatcatagcacattttagaattagatgccatcatgcgttttcattttccgtcaggtgtgttacaataacaagcagacatagaaagcagacagagggaaaaagatgccaaaacagaatcaaccaaaggaagagaaaagagaaaaggggacagcacaagcggtcatccgtgagattttaagctgggtgataccgtttgtgatcgcgcttgccgttgcgatgtttttgaaaaattatattatcatcaatgccgatgtgccgaccgggtcgatggagaacaccatcatgccgggggatcgtctgatcggaaaccgtctggcataccggagcaagtcgccggagcgcggtgatattgtcattttccgttatccggacaacgaggaagaactgtatgtgaagcgtgtgatcgggcttccgggcgagaccgtggatatccgggacggatacatttatattgacggagcggatacgccgctcgacgaggattacctcaaagaggactggacggtggcgacggggaattatcattttgaggtgccggaagactcttatctgatgctgggggataatcggaacgattcgtgggacgcacgatactggacgaatccgtatgtgagggaggataagattctgggcaaggcggcagtgatctactggccggtgcatgatattggaaagcttgagtaggggagaagcgatcgagggggtagttttatggttacattattggcgaagatattcattcaggagaagaacgatcaggcgaagattcgtgaagaatatggtgtgctgtgcggtgtggtaggtattctgttcaatgtactgctctttgcgggaaaatttcttgcgggtaccatcagccattccattgccatcacggcagatgcggtcaacaacctgtcggatgcaggctcttcgatcgtgacgctggcaggcttcaagctggcagccacaaagccggatacggagcatccgttcggacatggcaggattgagtatatctcagggctggtggtggcagcagcgattcttctgatggcgtatgaattgatccgggattcggtgggcaaaatcgtacatccggaggagacagagttctccgggctgattgttgtgattctggtgttgtcgattctggtgaagctgtatatgtatttttacaatcacacgatcgggaaaaagcttgattctgcggcaatgcaggcaacagccatcgacagcctgagtgacacctgtgcgacaacggcagttcttgcggcaacactgatcggacattttaccggacttcacatcgacggatggtgcggtgtgctggttggtgtattcatcctgtatgcggggatcagcgcggcgaaggagacactcaatccgctgttgggacagccgccggcagaggattttgtcatgcagatcgaccggattgtcatgtcacatccggagatctgcgggatccatgatctgatcgtgcatgattacggcccggggcgcaagatggtgacgttgcatgccgaagtgcctgcagatggtgatattctggaagtacatgatgtgattgacaacgtagagaatgaactgcgggagaagctggggtgtgaggcgacgatacatatggacccgattgtgacctccgatgagcacgtcagtgaactgaaagccgctgtcgtatcgatcacaaagggaatagatgatgtgattacgatccatgatttcagggtagtcagcggtccgacccattccaacctgatcttcgatgtgctggtgccgttccagttcaagatgagcgatgaggaactggttgcggcgatctgcggaagagtcacggaatgcctgggggataattactacccgaagattaaggttgaccatgcctatgtaaaataaaacgaagaagattgcggatgtaaaggaattgccgcaataagcagagtcctctttggagtgataagtaatattacaggaagcgcatgatgcagatttcgggtggaactgcatatgaaacattcgttggagaaaaatgtgtgtatttcttccagccggatgactgcatctgattccgtgtctaatttgaagttttcgggattgcgtcgtgaggtgtatgagcgtgatgaggagggaaacagcacaggtgtgttgattaagcgtacgtatgatcttaaaagtgaggcgcaggggcgaatgatccaggtgtcattgccgccggaagcaggtgcaaaggattttgcgtatgatcagccggtgacgcttgtggatgtggttattgattcggtggcagatgcacgggggcgtaaccgtgcagaagcgtcgtggtatctgaatgctgcagatcttgtgccggttggaacggtgccgggtggatccggaatttatattgctatcactgtacaattccatcagctcatccacccggtcttccagcacgtcaacgctagacgctgacacccgaagaacatacgatactttatacatcgcatctttagatgcaatcaattcatcctcaagttctaccgctgcctgtaacccgtctataaccgtgttatccgtatcctggctattctgataagcatggttatcaagatcctgcatttctttctttttgttccggacagtagttaaagcttttttattcggtgcaatttctacattgacactcacatccaccggaaagctcaatgcctcctggctatagtaaagtatttccgacgacggaaaagcaatctctccaataatcgtatcaatcgaaagataggctgcatacaccgtttctttttgtctctccaacttgacatatcgctgatgttcttcctgtaagcatctggataacttaagcagatcatactttttaaccaacgtttcttccttcatccgctcttttgggagcctataatgatattgataataaggcacccttgtttgtccgtacaaatgctccatcaagtagccaaaatctttctcttccatccggcgaaaacgaaaccggcgactgatccgcttcatcagctgcttttccatccttgcataacggctcatctccgagttacttacgctgtaaaaatctcctgccaactcatgattcacacttttcacaaaatcaatcaccgcatcacgaaccaattctttcacacgcgtcgccgtcagttcctcatcccgagtcacaagcttaatgccaataaaaaaacgataatcaatctgactaccgttccgatcatcatttttcatctcacttttttctacatcatcatccacagcctcatcagccaacgtatccgccaccagtatctctgtctgacgatcaacaaaatattcagctgcttccttatgctctccaacaacacactgtttggaacgctcctgccgctctctgatgcttgtctccgctgcaatcatcagaaaatgcatccgaccgtttttattcgctgccacaagctgtcgaaactcatcatggatctgattcttctgatccgccgaaagaaacgaataattgtaagggatcatttcataataagcaaagcactccttatcattattcaaaaccaaattattttcgatgtacttaatcggtatctggaacatacttataacacctcacaatcgttatttcatcttcaaacttacttttcccatattttactcttttccctgcatacgtctgcttaggccgcaaaaaatacaggaaaaatgatttcaaccaactgtacggccgtttcccgtcaaaagtcttttttgacataaaccaggcaattccccctggaatcactccatactcaaataatacgttattgcaatatgacaacggcggtatttttgaaaagacaaataatattgcaaaaaacgtacccgcgaaccatgctatctgcacgaaagtcacaggtatcggcaacggcaaatctccaacagaagataaatacttttcaaatttccaaacactcgaatagctttttattttccgcattttttctcccttctccccagtgcagaacactggggactcgtgatataatgaaaacccgctacaacttcatttacaaaatcaaaaatgcggcacaacaccagttatcgtcccgctgccaattattgtattaaaaactgacaatatagcatcctttgccccctcggtattatacacaagaccaactgcacaaagcgccgtaaaggcaagcgtcaccaaaccagccgttttatgctgcactaacaatacaagcccagccacagcaagtgcaagcaataaaatcggcttaacattcgacatcacaagattaaaaaaattctgaccataaaacatattacccttccttcctgttgcgacatcgcaacaactcctacgtttacatttccacaatttctccagtatccggatcaacccggatccccatatcagcaaaccgttctgcaagcatctcttttacttctgtttgctgttgtttcaacagctttttatgctgcggagataactttgcctcatcaatcatccgatcaagcagatctgcttccccccgaatctcagcgagctggtgcagcatcttaaaagatggcgccacctgacgtctgatccagttaagcgtccgctctaaagtatacggctccggcgcatccgtcaacttcaactggcggtcctcttcgccgataaaccgcgcccacataggatcgacatcccattttgtaatatcctcctctccagcctttggtatcaggaacgtcacataccggttaatgatcccgaacgccgtctttgcaggatcctcataatcaagaagatcttcaacagcatgtgtcgcgcgatcatccttaagacgtatctcaaaacggttcttcacatctgcatcctcaatctcttgtccggtttttacatactgttcatagtccttttcataaatgcagaaataaatttcactcttcatgctaccaagatataacgtattccccatctgatccctgtcatcctctcttgcacgtataagttcgccactctgatagttccgatacgcccgaaatatcgtgctatactcttctttccggcacttttccgcaagatacggaatgtcgagccatcctgccctgtcattgatcgctatatcaatccgcttgtacacgccatgttccatttccacctgccggaaaaagtcaaaccatgtacgcccctgtgcgttcaaaaagatctcaaactggcgacaacccttgcccttaagctccaacaagcatcccagcttctcatcctcggaatacattacaacaatatctcccataagatactgcgcactgtagccatacaatgcatgattctcacgaatcatatacttaagccgtattcccaacacatcctctaaaatgtgctttacatcaacactcggaaaccggatgcggcaataatccagtaatatttccaaacccgcatctggtcggtacagatcaagaaaaaaactgatcttttccaaaagcttgtccgatgcctgctttttctccgcttcaatacgctgcaagtgttcacgcgatattccaaccaaatcagcaagctcctgctgtgtcatatgatcctctttcctcctttcccggatcgtagcacctgacagttccatttccgcatcctcctgctgttttatttacaaaccgtggatatatggatatctatgctcaaagacaaaagaacgtatggataacgcatggataagtcgtggaaaagaaactgcatcttttccaccgcttacccacccgttttccacccggtcttttgtcttcataaaaacgcatagatacccacatacccacagtttcgattgacgtataagccatttccttacttgtcatgaatacaaaaaaatgcatttttattctttcaaaaagtcaatttttaaatgtgaccttttttattccagatcacattttggaaatagcgtcaaacccttatgtttactggcaaaatgtcactttttaatgggaaagtgtacccccgtgttacatgccgggggtcacgcgggagacggctgcgccgtctcccgctttttccctgctcnnnnnnnnnnnnnnnnnnnnnnnnnnnnnnnnnnnnnnnnnnnnnnnnnnnnnnnnnnnnnnnnnnnnnnnnnnnnnnnnnnnnnnnnnnnnnnnnnnnnnnnnnnnnnnnnnnnnnnnnnnnnnnnnnnnnnnnnnnnnnnnnnnnnnnnnnnnnnnnnnnnnnnnnnnnnnnnnnnnnnnnnnaccggacgttccgcccgcgtgcgccccggcatatacagcttttatactttccctaaaatgatgatccggcggcacaaacggcgaataatactccgtgatgacgccatcccacaatccaatatagccacgccctttaatatcttttgcgacaaactgcttttccgtcgttccgaacatcatcgtataaccgctatctttcatcgcacccagggcgatgcggagtccgaactggtcacgaacaccatccggcagatactttgcgtccgggcgctggcacgacagaacaacaaaaaaccccgcctgacgaccaagcaggattatcttctgcaggtagctgatcacttcctctgcctctttcttaggcaacatagacaaatacgccacatattcatcaaataccataaaacgggcggggaaccgaaacacacggtaattcttgcccggttcataatcagcgcaccgtttcatttctttcatcctctcaagcatgtcctcgtaaaacttcgcaacctgttccttgatgtcatccggatccgcatacacctccggaagatacccttccagcccggaaagatctgcatttttcgcatcaattacaaccagctctgcctctaatccggcaatcgcttcgataaaacttagcagcgtgtatgtctttcccgatccggtgtctcccacgatcagcgcgtgcggatggctttcgtaatcccactccagatgacgcatcaactgcagcttcccatccctgcacctcatttcatccagccggatcctgctagactccacatcacacaaaaacacgtaatgctgccactttcgtttataactagatgcaattagttcacaatccagccccgtttcgatcttcccgtccagctttaaaagactgtcctgatattttcccatagtaatcttgactgtaatatagatccgaccctttttccgtttataataaagccgcggaaagtctgtaatactatatctgcgccaaaaatacaaatgcggtacatacgttatcagatcctggtctcccttaccgttagacctcatatccgacccataccacatattatcaatcagcatacgagcaagctcctgacgattacacaagtcctcccaaaaccaccgctgacgatgcaagacaccaaatacaccaatcaatagcatcacatcaaacaggcataccgttgctatattgctaatcactggtgcatcaataaatcgcaacgacagattttgtcttaatacaagccaaactccgattaccgttgatgcgattaacaaaaagatgacagaccgagctaccagtctgtcatcccacttttttatacgccgtccccagcgccaaaacagattcatttatttatgccttcttttccggctgcttgtcctgcggctttcccgctccagctccggttccggatccacccggcaccgttccaaccggcacaagatctgcagcattcagataccacgacgcttctgcacggttacgctccgtagcgccatcctccgcaccaaacgtatatactgcattatttaagcttccatggaacgcatccgactttacccagcccgaaaacgtatagcccggtcttaccggatccggaattgattttgccactccgtaattctcggtaaagctctgtacatcagcactcccattccaggttccgccgtttggatcaaccttcaaggttgaatgattgatttctgcatccgctgtcatagatacatcctgcatcggcatcgagaacgtgtattgctttgtatctgtctcatatgtacctgtccagcctttccaatgataccccgttgccaatgtcgcattgatcgtcacactctgtcccatcgtgtaagatccggcgccgctgacactctgaattccggttcccttctgcaatatcactttatagcgtttcgccgtccaggacgccgtcagaacgtccgttacaccgttatccgtaccaaacgtatacaccgcattgtttaagcttccatggaacccgtccgactttacccagcctgcaaatgtataacccggtcttaccggatctggaattgattttgttgtcccgtaatctccagaaaagctctgcacatcagcactcccattccaggttccgccgtttggatcaaccctcaaagtcgaatgattgatttccgcacttgctgtcatagatacatcctgtcccggcatcgaaaaagtatatcttttcgttgtcgtctgatatgtacctgtccagcctttccaatgataccccgttgccaatgtcgcattgatcgtcacactctgtcccatcgtgtaagatccggcgccgctgacactctgaacaccagtacctttctgcaacgttacctgatacgcattctccggaattgtggcaacatcacttgtaacatggtaggtatccgaccgagtttcaatgtcgctttccgtataaaggaacacgccctggtttccgtcatagtaatacgccgctgccattttgctggcacattcgtccgatgctgcaatctgattaagcacataacccataccggaataagtcataaaataccgataattaccgattgatgtatcaaaataagcaattttttgctgaacagtattatgactcacataaacgccataccaatattccacctcactatctgacggttcacgctgcaacaaaaaatgataacagtctacaataagctgtttcggtccgttccgtgttgccaaattagtatccacactataattcagatttgaattgctatactttgacatatattccgtactaaataccatttccgttgcaacacgcgcagcttcattcgctggccatattccaatcgcatcataaattcccactaaatagctgttctgtgtatgtccatacagatgcggccaccaggattgaaattccggcacagacccttctctgtgcaaaaacgccttataatcctcattcaacagtgaatatgaattgttgattaccacagtcaccgcacaacgatactgatatccacctcttcccgtcttacccacagtataggaagctcctgttgccccggaaatatcctgccagccacttccacgattttcctgccactgataacttgctcgctgtccatctatcgtctgatccaagtcacagttaaatgttatatcacttccactcgtactactgcttatactggcatgatattccaacgtccccgcctttaccatcaccggcgatccagcaagcatccaaaaaagtcctacgacaaatgccaccgcaaaaataccttgcacccaccgtctctttaaatttctactttctcgcaacaataaacactccctccctggcactttgttctttttacaaaataaaaaagtgctcttacagtacaacactataagaacactctcctgttttgacattttttttttcaaacaaaaattagtcaaacataataccgtaaccattactagttatattgaccttccctttagctccctcataagcgataaatgattccccctccaatggaagtggagactgaaaataaagtcccttaggatctaccaaatctccttctgttacctgcctgtaccaatctgtaaccctatactctccatctacatatgtatcgacatataccattaccatttctcccgtactctgtcttcccgtggtgccattatccgcaatcgcaccaccgaccgtaatgccggcattctggcaaagatttgcaaactcgatacttcctacaaagccattgtatacgacttctctggaagcgccatttctaagatgtaacacccaatccgtaacgcccggtgtatctgcttcccttccaagcattgtcttataaagcatcagcacatactgtgtatcagatgcatctttattcttatattcctggctgaatataaatccggaagccacttcactgccctttgccccattcgcaagagccgttgaccaatcattcagccccgccacatccggttcacggtcaagacagcaggtatacaacctttctgcaaacgcctgaatctccggcgtcacctcatgactaccgctgtcacagatcgcacagcttccactgaccggaatattgtctgcactccaatctcccgatccctgatcgattccataagctgcacacaggtttgcaaactcctgcgaattcacaaaacctgtcataacatgccccctggtagcgccactgttcaactgtcccagccagtccgcttttccagctgcatccggctcacggttaaaaaacgcttcatacatggcatctacataatgctcattgcacagattcaagttccggaactcttcactgaaaatgaatccgaaagcaatatttgcgccctgctcctgtcccgttgcaagacgattcgaccagtcatccaaccccgctgcatctggctcacggtcaagacaaacctcatacattcttgtcacaaacgcccggatacctgcttcatccgctgcttttgccgttaccggcgatccggcaaacatcccaatgctgatagctgccgccgtcacaaatgctgtcgtccgcttccatacttccttcatcttcataacaagttcctccttatatctatctaatgaaaaatgtaatcttctctcactacaagtataatatcccttgtcagatatatcaactatattttgcgtaataaatctgactctgtgttaccggctgggtaaagtcaaccggatttccctccacatctacccagtaatcaaaagtcttaccggaaaccattggttccgacggagcagatattgtatcacccggccatacattacaggttttatacgtccttgcatctacaagaaatcttacctggcataactctgccggatcgtcctgcagcttattaaaaactacagtccgctcacacgatacactaccctcctttccattcggatgctgatacgatgctacaacctttatcgacataagcccctttgctacatcgatattctctatatttacagttatatcactattgctgtccaattttccggacagatcctctaccatatcggcaatcatctcattttcactggtgatatcatagtttttttcctccatcaattctgacacggtttcctcaaccgccgctggcagattatctgccagctccatctctctgttacttctgccgccacttgccataacgctcacaatcgttatcacacccaaaaagaacactgaaaacaatactgctatctgtttcatatcttcctcctcgcatcatcctccatttaccggaagctttatttcctttatcacagcgcgctgctttccatctcttacctctacccgcaatgtataaatgccccgcgcctggaaagcaatttcctccacaggctgatcgcattcctgccattcgccatctgcatatttcacacctaaaagtgtcaatctggcatcattccctgccgcatcctttgcgctgattaaatctgtcagcttatatgtaccaatggtcagcgcatcctctgtctgttgcgacatcgcaacaacaggataaccttcactgcattcttccatatacactgtatatccgcttccatccgtgtcctgccagcttgtcatggaattaccaacccgtcccataacgccaccagacggcagcaccatgaccaacaccaggagtaagacaatcgcataaagaaatgcttctccataatgatctacaaaatactgcatagtcctcctatccgagcagtcctgccatatactgcattataatctgtccaagtgttccaccgcacaacatcgggaagaaatacgaaatgataacaagcacagacacaagttcgcacaaaagcattccgccatactctttcatgaattcatacatatgccgccctccttaccttaccatgcagttaaaagagtcaaaacagataaagctgcctgaataagatacctgccgacaacgaagatcaacgctcccattcccaattcttccacaaaaacatccatctttctacctcccgcttatcttgcaattccctttgtcatgcgcgtctgttcaaccccgagcaaaggaatcttatatgtatacgtcaattccacctctgccgatgtaatatcacgcgcggtatcatatgttcccggcgtcactgtcaaaacatatccagatgcctgtgcgctactttttacagcagcgatcacatccggattaaaattactgttttcgatttctgatacagcctccgcatgataacgctttgcttgtgctgccttctccgtcgcgccactcacctgtagccctgtgccaagcgaaagaatcaatacaatcagcgcaccatacacttccattatcgccttcattcattaccctcctacagcgctgcactaaagatttgaaagaacataatcgttccacacatcatatcaacaagtattttcgctgacgtagcaccaaccggatacagggttatcatatgcgctttaaaagcaatattctttccctgctgctccattgccttttcttccatcttatgtacatgccccaccagatcggtaagctgcttctccacatttcccgaaccagcgacagagatcgaataaagcattttcatacatgttgcaatctccggcacatcaaaatccttaaaaaacatcaaatacgactgtatattttccggatcatccgtgatacgctccaccagttccatcagttcctgctttaaaagcgtttccgccgactcaatggactttgcaagagctacctgtacattattcgtctgcaatagtaacgccatatcaaacatccactccggcagtatttgatacaacgccccttccacatcctttttcgccatgctgtacactaaacgggaagcagtaagaacgagcactccaatcactccgcataccacactaataacttccttggataaaactacaccaacaacagccattataaaaaatggcaacgacatcagtacgctccgtttttcactcttcttaccgtcataagcttttacccttgcatatgcatccagtaccagtttctcatttatcgtcttctgctccagccaatcactggtcaactttttattacttgcgtaaaaagcaaagaagcaaaccaacacgaataagaaagacgacacctgcacaggccctaactgaaacaccgtaagatctaacgcgatatccattgcactctttgtggaatccaacatgtacaacgtcatgcagcaaactgccactgcaccaataatggatattatacagttcgcccgttctgtcttcttgtccttttgcaatccgtatacctgacgcttccacacttcaacatcctcaatcatcagatcaatagatgtccggacatttcctccacgcccctccgcgctaatcagcaattcatgcaccacatgcagtttcgtacatggatactgcttttcgataattgcaaaagcatcccgcaacacatttccctgctctgacactccattctcgatgcacaaaatcgcatcgcttattgcctgtctcatacgaccctctggaaacgattcctcgcattcctttaatgcgcttaacaccttattttcctttgcaaaagagtacaaaacctgctccatataatccgttacatccgcaaaacgtttctgttcatacatctcccggtacataccaacaataaacagcggtaacaatgccagcgccacagctaccacaccaacaacaaacactaaccgcagcttaaaaagaataccaaccattccgatcagcaaaagtaccagcaaaacactcaaaagatacgtcccccagtaaaaatcatatccgaaagcatgtacttctctttgcaaattcaccggattccaaatacttcccggcgttttctcacgcttttttctttttttcctttccatctccgtctcccttctgttccgcattcctgtacaaatcccattccaactgctcacaccgatacggattaacaattccggctcgtttaaaccttttcgcaacctccaccggaatatcctttgtcagaaaccgtccctcatcaaagatcatgcagatctgattttctccttctgatctagtataaaaacacatctgatccagataccgtctaataataccatcacaacccttttccatccggatcaacacacctacatccacgtaactgcacacctggttaacgaagctgtcatctcgcactcccgccatatttaccattcgatccggaagcttacgaacgtctgataaatggatggttgtaataccggcgacgcctgtactccagcactctaccagattcacaacttctgccgaacgggcttccgacattattaaccagctcggactctgcctcaaactcaccttaatagcatctttataaccgaatccgtcccttacctgtaatgccacccaatcatgcgccggattgatactgccataatgtaattcaagcgaatcctctatggtaatcacacgatcctcggcgggaatatacttcatcaggaattttgcaaattccgtctttcccgcattaggctcgcctccatttacaattaccatccgcgcctgcacacaatttatcagtaaagccagcaattcctcactgcaaaactcctgatcgagcaaaccttttgctgtattacgcagtaccggcggagatttccggatcgatatgctaacacctgtcctggctatagacgggtgcagcacactgattctaaactctttcgtatctgcctcaagcaccggatcaacgctgttatacggcttattcacagcgtttgctatagccgtggtaaatcgcgtcagaaacttctctgacacggtttcctcaaccgcatatcgcccctgccataaagacgtaatccagagcattccgttactgaaatttaattcagtaacatccggcttttccaaatacttccaaaaaacgccaaactgttcttccgtcggcgtaaaatcaataattcgtgccaattacctttcatcctttctacatttttaacaggcaaaatgaaagaatactctcactttgcctgtccgctacgccggtcatactacgatccaatattctgcatcgatccaacaaagtccgtgacaacgttcgtcaacaaactgttcgctgtatccgacttaaggaatgccacaacaagtattcctactgcaagaatggatgctcccgtcaacagagccttaccaaaatgtcccataaaaaattccattggattttccccctttcctctttattgagataatcttgtttatctcttataaacgtatagttgatctacgcttataagggacaaacaagtcccttataaataaacggctgtctccgctaccgttcctccggcatcatcacactttattcgcttctccgggtatattaccaagtcatacccccgcggcatcatccgcatgttagctagggtattgtctggctatcgatcacgctacagcctattcagttgtcaaggtacaattatctcaaatgggaaaatctgttcgattgaactttttgcgaaaatgctatagaataatctcgtatgtttacattttcgtatttatacgaaaagattttcctactgggctttacggttgccgccgtaaagcccctttccatttcagctctgtttccagatccatgcggatcttcttccagaaccgattgcctgtcctgctttgatgctacggtcagttacaccggaacagacacgatcctacttctttttcttcaaatccttaagatactctttcaacgatgtcatgttagattcacaatctgcaaaatgcttatatcccggctttaacaggtataatcttctaccctcggcttcctttttactccaacacggaatgatatatgggaataccttaatcacaatcgccgcaccatccggcagatcatatctgtaaaaaacttcctccgtcaaatcattcctacaccaaatcttccaatccttatatgtattaacaaaatcttcacgttcctgcatattcttcatatctggaaaatccggctgtccctgccgatctgactgctcggctactatctccacaggttgatcttctaccatctcttccggttgcgacgtcgcaaccgccaaaacctcttccaccgatttattttcttttacagcaatgggtaccacttcatcaactttttgttttgtttctttcaactgttgttttacttccctgatcttcttcacggacatatcactacggatcttacatcggtcacactctgacatcggcagcatctccgcaagctgtgagtacgaaaagtccttatacctgtcatctacccacattttacgagatccatcaccgtctacggccgcaaaagttttccagacaccaatacaccgcgacaccgctgatttatccattgcaaaatttgcttcaatacattcatacaaattttcatatcccagatcttcatagtatctgcactgatccatttcatacaggtggaagcctaacgttacatatcgtttctttatatccatcacatctgattcaatgtaacctatggatgctcttgccagctcattgacttctttcggagcataaatatctgcaccaaacttaatgttcatccgctgcctcctgttctctgctatcactggtcttagttccaatgtacacttctttatattttcgctcttttttccattcatcttttaattcaagcgcttccatgtaagtttcgcattcttgtgtttccgcttcacaatctttgtgaggtcgcctaaaatatccaataacaacataatttgccatagttttatttctcctctaaattctaatacttacgcctccaacaactccggattgtcaaatctgttaccgataatcttaatttttccgttatcatcagctgcccaataatgtaaatcttttctccatacgagatcgtcaagccatttgattctccattcgaatttatcccaaataacaacggctttgccgagtctgccggatcatttattttcttcacctctccgcaatcacaatcacaagcttccctgtcacagtctcattcaacttcacatgatacttgtcctccgctactgattctgtatccgtcaaatacaacgcaacatgtatcaatgcggccgcatccgtaagcgttgttaaattctttactacaatttcacccaataacttcacctctttttcatagtctcaaaaaaatccctaatcgcctcaacgcactcacataaagccttaagaagcggatcaagacaaatcagcatcatcactaccataatcaagaacaccactcgcaactcaaaaggtccaaataattcatatgcaagagttccactcattcttccccgccctcttttcctaaaaatttatcccgcttagtgcgaaatagctccatcttttctttcatagtctcaaaaaaaatcccagtcacctcaacaaacatgcaaaaagcataaaaaaaacaaagtgatccaataactgctccgaataccacaaaaagagaaaccatatcttttataagatccatttcaaattcagtcattcctccaccccctattctggaatattcttatactgtacactaatggcaattcctgccagatctgcaagcctgtacaattccccaagcttaatactcccgggattgcgcaacttgttttgcaatgtacgctcggacatccctaccttacgacttgccgtatccgtttcaatatttccccgacgcaagccgccaacgatcattcctgctacataattacaacgcgctgcttctttattctcgcataattttgtctttggcatccgtttctcccttccgttgcgacatcgcaactaattcattgtttctcacgaatccactcccacaaaacatatacaactaacgcatttactgatattcctgtctgttttgcatatgcctgaagtagttgttttaattcctccggcactcttaccgttataacatctgccattcatcttctccttaattcgcataagtgatatcactttgatatcaaaatatcatggtttcattatgatgtcaatatgaaactattctttcattatcaatctgcactataatagtttcattaagatatcatatatccaaaaggagatttcactttggcaacaacaaaaattccaaccatgttacgtttaccagaagaccttcacttaaaaacaaaaaaaattgcgcaaatcgaatgtcgttctgtcaacgcagaaatcgaatatatccttgcaaaatatatctccaattatgagtcagaaaacggctctctaccaatcaacactgacgagctttatgaataagcaaaagaacgtatccattaaaactcagcccaagttcacacgcttcttttcctaattgcatttttaattcacccggcatccggacaagtgcgggcacacgagattcacattttcttttctcctctacatcacaacgcgccgcctctttattctcgcataattttgttttcggcatcctcttctcccttcccgctgcaacatcgcaaccgtcaaacattccccttatcatcatctaaaaaaaaatcaactgatactccaaaataatctgccaaaatctttaacttatcagctttcggattactccgaccacttttccaatcagaaaatacagatctccgaattcccgtatctttcgctacccgataatccgtaattcttttattatctctcaactcaacatacttagcgtacactttttctcccttccgaactttatattgattagagttcggaaatcaattataatatgttttgcggacaaattataataaggtattctgttctgatttccgaaccctttttaatattaaatcggatttcagaatttgtcaatacctttttgtactgatttcagaaccatttttagaaaggcaccttactatgtatgaaagatattgcaaattaagagattctctcggctacagagattcagatgttgccaaaggaaccggcataacaaaatcaactttctccgactggaaaaacggacgtagcattcccaaggaagaaaaactaaaaaaaattgcgctttttcttaatacttccgttgactatttacgatatggcgacaaaacaccatcctacggtttaaacactgatattccacacaccaaaacaactaatcaagaaatcatagaattcgcaaatcgaattatgtcagacgaagacgaaacattccgtaaacgtttcgtttccgcgctggcaaaagcaaaacctgaattctgggacgatctcgaacgaattgtagatgaaacaataaacaaggactagcataatactagtcctcatttcaattctgtatattttttattaccatccaaatctgtttcaatatccacaaattttgaatacttcttacttcccttataatttcacgcctacatttttccgcttcatccaccatgatcctgctctcctcttttgtaataaaacaactccctaacatccacattaagcgcatctgcaagccgaaatgcaacctccgccgttggattcgtattagtaccattttccaatttgcaaatgacgctccgactcacacccgcaactctcgcaagctgctcctctgaccatttctttttccaccgatacatctgtactctattcttaagtcccaactttaccccctatccgagtaaagtatacaatagagcttgtaataataattatggtaatttcttccacacaactacataatatcatatattttgtttccatacggaaacactttctcctcaaattacaccagatcgaatagcttttttctcataaatatgatataaaatatattttatattaacgatcaagcactaactacccaatcaggaaggactaacatggcaaagaggaaaatcggcgaactgccaagcggaaatgtccgcaaaaagatatatgatcattcagaattatgctttgatgaacagggaaaacccatcatcgacccaaagacaggaaaacagcgaaaaaagaaaatttacatctctgttaccgctgcatcagctacagaggcaaatcgcatcaaagcccagatacaagcgaataaaaaaaccttgcaaaagcccatttcaatgaccctctatgatgctattgacaaatacatcagctcctcagatgctctattgtcgccatccacaatccgcggctatcgcactatccagcgcaacgctttcaagtccattatgtcatgcaagctctctaccttgacaaacgaacaattacgtgatgccgtaaacctggaatgcaaacgaacaaccggtaaaaaaaatccaaaacccctgtcatccaagacagtcatcaacgaatacggtcttatctctgccgtattaaatacctatgttcctacattagactgctctgtaaaactgccacagattgagcacaatcaacacgatatatctactcctgatgtcatttatcagattgtaaaagaaactgacatcgaactacccgtaatgcttgccatgtggttatcctttaccgaatccgaaattctcggacttacaaaatccaaatccatctctccagacggatcacacataaccataaaagaagtgctggttaaaaacgaacataaccaatccgttataaaaaataaagggaaacagccgaccagagatcgaaccctacagattccggattatattaagcgcctgattgatcaagtcgaaaccgatcagctcgtaactctatctggcaccgcactttcaaaacgttttgatcgtctaataaaaaaagctggtatcccacacatgacatttcacgacctacgccacgtaaatgcttccatcatgaccttactaaacatacccgacaaatacgcccaggaacgtggcggctggaaaagcgatcacataatgaaaagtcgatatatgcaagcattttccgccgaacgcgcaatggtagatgcacaaattgattcctacatgcaagacaaactcttcaaaaatgccgccgaacgccgctatgaccataagtaccactgctggctagaactgtttgatttaaaagacactaccgaaaaccgaaataattttctacaattctgcgaaaaaaataatataaatctttaaatgtattccacgaaatactccacgaatttatgaatacactgtttttcctatattctttaccataattcaacgggttcgattcccgttgtctgcttaccttaaaagcccggtagaatccgttatggattttaccgggcttttattttgtctttggtgttcagccccccgccgcacttttcgcatatcataatagagcttgaagcgtaatcctatttccaatatcctcctattgcagagttgttacataattgttacaattcttttgtgcttagctaacacaaataaaaataaggaggacgaaactatgtgctttaacttcaatagctgttccgagttatttactgctctttgcaaatactttaacctcggatgttaattacccacaggataaacgatgcagattctgacatccgcatcataaaacacaggatgtaacacatcccaaaagcgccggcaccgatgaacttcacccatcggtgccggcgctttttatgacggctcattctaattaacatatggaaacactaatatgattcgatactcctgattttccttttccacaatgcattccccattcatttttttcatcatatttttgatattctgtattccaattccattactttcaactttctcttccggcaggcgcactctgttttcaaacaaaatgcctacccgatccttttctttcctggaaaaaatcctgacagcctccccagggtctgcatatttgatgatgtttgatgtcacgttatccataatgcgtatcatataatctgtcgatatgcttatcttctgctccacccattctacatcgaaatctacagtaaactctttctgttccagataattacatgtctcagaaaacaaatcaaaaaaaacggtctcaaatagttccggttcttccaactctatctcctcgtccccggcaacaagagcatactcaaacagatgatccaccagctgttttaaccgatatgcttttttgtttatctttttcacatactctttccgctgctcttctgttttatactgttctttctgaagtatttccgaatatagcatgattgcagtaaccggtgttctgatatcgtgtgacatttctgtcacaatccgctgattttccttcatcatttccatttcctgattcaacagactctggaacgcaatccgcatattttcaattccctctgctagcatggccaattcatctttccccttgaccgtgatggaataatcaaggctaccaccttccagaatagcaatttcatcactcagttttaaaatatacttcattttctttcgtattccaagcagaacaatgccaagaaaaacagcgaaagaaagacagattgatgccaccaatagccagttatatagctgatagctgaaacttccggaaatcatgacttccaccgttatatcagacaattccagatcataatagctttcccacggataattacccgccgcaatttcgcttacgctgacatcttccttaggataatcagaatcatatatctggatttgatccttatatattctgacatatatcatcttctgcctttgaacccatgtattaagctgtgctatatcactcgatgaaatatgctctgccgtcacatatttttgcattttagcaagatatttcaggttttgcttttctatatacgtagagctttccagataatggtcaagaacatagtttcccgttgaataaaatatctgaaaaaaaacgattgcagcaattgctgcgccggttaagagatacagcaactgtacataaatagaatgattcttacttactatctgtgtcaaatttgtacccctttccccataccgtttttatatacttaggatttttagggtcatcctctatttttacccggagttttcggatatgtaccattaccgtgctgttgcaggagtagaaataaggttcctgccacacactctcataaagattttgtgcagaaaatatttttccggcatgctgcatcataagcagcagaatatgatattcaatatctgacatatctttcatcactccatctatatagacctcgttgaacttttcatgaattttaattccattcagtgtcagataagagttttcattttcatcccattcgcagctccttcctctgtatacattataacgcctcagtaatgctttcacacgccctaaaagctccgcataagaaaacggttttgcgagataatcatccccgcctgccataagacctatcagcttatctgattcctgtgctttcgccgtcaaaaaaagaatcggcacattcgatattttacggatttcctcacaagttcggagtccggacataccaggcatcataacgtcaagtattacaagatccacttcatcattcagacaataaagcccctgtcttccatcttccgcttccataacagcatatccttcactctcgagtaaaatccgcaccccatcacgaatatccgcatcatcttcgacaattaatacctgctcttttttcatgctttgtcctctcctgtcacattcttaatgtataacataacagatttgtaataaaccgtaaacgcttagcctgctttcttgataactttcatttcccggaccgctttctgctcgtatattttgtattccttatcccatgtgcggtatgttttttcgcctctgtgatctgggaaagtataattttgggtcagataattgccaaggtatcgtgtaaccttatctgctcccgagtaatttagatgatctccgttgtcaagactgtctgtcttccagttaatccctatttcttccgtcttcaagtttaaatccagaaaatccagccccttttcccttgcgtatgcctctatactgttatgcctcgcataattacagtttattggagacggagtgcttaccagcaacagtttcgttccatttttttcacacagttttcttattttttccagatagaaactgacaatttttgaaatttcttctttctggtcatttttctgcatatattccccctgttcgtatggaacagtctcgcagcgaaatgcaaatcccttataattctcagcaggatattgtttttcggataacatggatttccaaatatcatgtccttgaaatattggaatatagcgatagccaatctcacccaggcaatcttttacttctgatgacaaatttttgcaccggaacaccatattcgtctccagaataacaagcttggggctctgggtttcatatgctgcctgcagcatatgaaaagcttcctgcattctctgaccggtctgtccacacacataccctgtcattccgtaatcgccccaccacgccatcggggaaatggacgtcatacccagactgtcccctaatacaatgatatccacgctgttttctggctcccttaatatccggaaaatgcttttatttcgatccagtacatagctgtcattcgcaaccattaaattcactattctttccgatacacccaccagaagcagcaccagtatcatcataaaaagtatattctttgaaataatttttttgaaatatttaaaatcctgcataaatcatatccacctgctgatagcccattccatatgcgcccagaatcaataccgcaaaaatcaaggcgtaataaagcgtccacctgaccggaagccacaatttctggattccttcctctcccagcagctttttctcttttataattccgacaactgcaacaacaatacaaccggcaataaccacaaaataatccagccggtcaagtccgaccgacattaaaattcctcttatttcctcctgccgtgctacaatattctcaaaactctgaatattatttcccttaaaaatgctgaaaaacatgctcattcctgcctgaagtccgtttgccctgaagaaaagttcccctgtaaaaataataagccacgttttaagagtctgtaatattcgatacggcagggcattcttatccagatgacatatttccaatatgttatctctcaatggttctactgccacttcagcaagcagtattacaaaatagtacattccataaaaaatgtaactccatcttgccccatgccataaaccattgcatatccagaccgggaatagacacagcgccgatatgcccagctttgttaaatattttccacaatgcttctttccaaatttattccacttttttacaatgccagacacagataccggataaaacacatacgttttaaaccagacaccaagcgtaatatgccatcttctccagaattccgccgcgctttttgaaaaaaacggttgtctgaaattttccggaagcgtgacgccaaacattttcccactgccgataatgatatccatgcagccggaaaattccatgtatagctgggtggtgtaagcgattgccacgataacaatcatttctccgtaatgatactgataattattaaagattacatccacaagaagatacaggcggtctgctatcagcagctttttgaaaagtccccagaaaattcttacacttccctgcgccagattttccatcgtcaggggatttccctcaaataacgtatctgctgtctgcgcatacgaactgatcggaccttccataatttgtggaaaaaagcccagaaaaagagcgatctttccaggatgcctgaacacctccaccttttcccaatatacatctgccatatatccaattgcctgcagcgtataaaatgatatgccaaccggaatgagcatctgctttgtacccaaagccagactgcttcctccttgtgccagaagcacattcacattttggataaaaaagttataatattttaaatatgccagtattcccagaagaacgcatattccaaatactaatatcgctttttctttctttttataagctttttttatagtgcctgcctcggttctctgcattcctgctgtttcatcattacattttgtttttatccatgaaatccatactgcaatgtaatgcgtgaataacgttgttcctaacagataaagcaccagttttccactacatatccagaaaaaaaggtagccggctgccagcagcgtaatccatctgctttttttcggcgtcaactggtagagcagaaggacagccggcaaaaacagaagcaaatatatccctgtatggtatgccatatcaactctcctgtaattttgttatcattctccacatggcattgactgaattaagattttcaggaataatttctgacgcatctatctcaatctggaactggtcttccaattcagagatcagggatattaccataaaagaatccataatcctgtcatcgatcaatttttcttccttatcccatgcaatactactgtctatttccattaaaatattcatcaacttttccattatttgtgatcctccatattccatttgtaagtttcctgcttatttcgtgccaatttaaagccttccttttcactgtaaaacactaccgcaggcaattcatggctcaggaacaatgacattccctctgtcatcgcgtaggctcctgcattttcaaaaataataacgcttccctccccgggagctgtcagctcaatatcccgaaccagaacatcattcgctgtacaaagtgccccacagatggtccatttttctttttttccttctcttccgtctggatacattctgcacttcggctggtacattccccgaatttgcccatcatactgaatctgatgcattcctccgtccacaatacaataattcctgtcattatttttcttacactcgtgaacacaggtaagataatatccacatgatgcaacaaacgcacgtcccatttccagcattacctttcctttccatttcattccagatattgctgtcttaattacttttatatccgcttctaaagtatcttcctgatctttaaaataaggcactgctattccgggaccgtattctaattcactcattgtaaatccatacttttgttctatcttccagcaaaatttatccagatacgcaatttctttgctgaatttttctgctgtttttttctgtgttcctgagaaaaaatgtatcccgcaaactttaatcattggaaactgatcccttgaagcaattattttctcaatcgcctcctcatccataccaaactgatttccgcttgtcagtctcagatatacgttgattttctcaccgtgtgtactgctccagtttatgtagctgtaaagctgttcaacggattctaccgtatagcggcatctccccccgtatatgttcaatatctcagtaatatcttcctttttctttagaactccggatatcagcaatttctccgcttctatctgcaattctctacaaatctcaaattcacccatagaacatacttcaattctgtctgtgactttcgacattgtacatgtcagaaaaggatttgctttgattgcaaaacacagtcctgcgctttccctaaacctgtccctaaaataatctgtctttctttttacttcatctatgtcaaatacatataacggggttccgtattttgtaattgcatgttcaaacttttccaaatccattacgtcaccacttcctgtcgttttccaaagtaattccgatctattttcccatttttatttaatggcatatgcgcaacccggacaatagtatgtggaatcatatactgaggaagttttttcttcagaccattttttatttcttttgactctgctgttccaaaataaaaacctaccagtctgtttttcttagtattcataacgcagcaactattttctactccgtccaactgattcaacgcatgctcaatttcctccagttcaatccgatgtcccatatgctttatttggaaatcttttctcccggaaaaatacaactcacctgccgcactgtaatatcccagatctcctgtacaatagtaccgcaccatgccgtctgcagtttccatccaccggaatttttttcttgtttcctccggattatgataatattcttctgcgagcgactcacctgacacacagatttcaccgtttttttctgccgttgaaatctcttttccttcatcatccataagaaatacttttcttccgtcaaaggctttcccaagcggcagaatctcatcatcttcaaatattctttttaccctgtaataagtgcagttgcaggtaatctccgatggtccatacagattcacaaactccgcctccggcagtgcaagctgccactgcctcagctgttttaccggcattacttctccgctgaacattacccgctttacttctatcggtattctatatttcaatccgtgcaacgctgaaatgagcgtaagcgccgataccgcccagatcagggtatttacatgcttgttgcacaaataatccagcagcacaggtggtacagaaaatagttttgtcggaattataacaagtgccgctcccgtcatcagacacgtataaatatctttcactgatacatcaaaatcaaacggagcctggtttccaatgacatccgtctctgtgaaccggaatgtatgaataaaatgtgtaataaaatttattactgatttatggcttaccacaatcccctttggcactccggtagagcctgaagtaaagattccgtataaacggtcatccgctgtgcatgctttacgtactgcaagaagttttctttcatcaatctgctctttcataatgtctttcaacagacatttacattctccataacccgtttgttccagaagcgcttcattttctgccggtatgatgataatttcaggtagcaatgtatgaaatatttcgcataatctttcgatcggctgtttgggatccaccattacataaaaacatcctgcatacactactccaaacattgcagccaacgtgactgcgcttttttccgccaatatcacaaccggtttttgtctgcctgttcttttgcacaatgccgtcccgatgctttttgacatttcctgcaattccagccacgtcatacaaatattcccgtcatcaaccgctgttttccaagcattgcatactgttgttctttccaaatagtccagtatgtttttcacaaatatcgctcccctaataaagttttatgtagcaatcagctacgtatcacattattatctttatttcttatcaatttctaaatcaaaccttaacaaatctaaatcttacaaaaagaaagcgccggcaccgatgaacttcacacatcggtgccggcgctttttctattctacactctttaacgcttccaccggatcaatttcatccagggagcggttcgtcagcagatccaccaggatcgcaaacaaaaatgagaggcctgccgccatggcatagcttttcccgtgaagggacaccgccagataaatcgacggcatgttcaaaacatacgttaaggtctgcgcaaacgcatatcccagcggaattccgcagacaatgccgatcgccgtgagtatcatggtctctttgttgacatacagatgcacttcacggtcaaaaaatcccagcaccttaatcgtcgccagctctctgctccgctcggaaatattcgtcgtagacagcgtaaataaaaccacgaacgcgagcgccgccgccatgataatcacaatgtagaccaccatattgatcagggtgaacgcatccgagaactcatccgaaagctcctgcttgctggtgtaggacacgataccctcttttccgccgagatcatctgcataggcaatttcatccgaacattcttccgacaactttaaaaatactccgttcggttcataatcgccaaacagcgattcataggttttctctgtcatatagacgttattgccgaggtaattgcggacgagaccgcttaccgtcacttcccgctgattcagatcctgatcctgaatctccacctgatcgccggccgcaaacccaagcacatttgccgcattctgcgtcaccagaatctcgccgtccaaaaggccgatctcctcatccttaagattgtacagaccaatgtactctgcaagaggctcatcccccggcacgacaatcatctgtgccttttcttccttcccggcagcattcttcagcttcaccgtggaaatctgcacgttcagcgcactttgcacattcggatccccatttacataggaaagaatcttgtcattgtcggatgctgcccccgccgccatgacatcataccggtacacattctcatactggcgcggcagcaggtctgtcaccgaatccctcaccgcgaatccgaaaagtaagagcgccatgcatcccataattcccgctacggtcatgaaaagacgctttttatagcggaacaggttgcgggcggtcactttattgagaaatgacaggcgcttccataccggcgtgatgcgctccagcagtacgcgggagcctgcgcgcggcgctttcggccgcatcagaactgccggcatgtgtacaagttccgctttacatgcacaggcggtagcgatgacaattccggccgcaaaaagtgcagctccgccacatccgagcagcggcataaagcgcagcagatattccgggaacagatacatcgtatcaaaaatccggaaaataatctccggcagaagaacaaatccgcacacatttcccagaattccgccggacacactcgccgcacatgcatacaccagatattttctgcggatctcacgatccgtaaagccgagcgctttgtaggttccaatcagaccgcggtcctcctccaccatacgggttatcgtcgtcaggctgatgagaatggcaacaacgaaaaataccatcgggaacaccgtaccgatcgcctcaatcgacgccgcatcgctcttcacattggcataaccgctcagagacgtgcgatcctgtacataccactgtgtcatgtcaatgtccgcaatcttttgctcttcctccgcaatcgtctcattgaagtccgcaagattttcttcatattctgccttgccgtccgcgtattccgtctcaccttcaagcagcttttcccgtccttcggcgagattttcctcaccgtcctttatctgcgccgcagtctcctgttccttttgcgccagctgcgcctcgccttcggaaagcgccatactgccgttctccagctctgctctcttatcggcaatctgcgattttccgaagatgatctgtgcttccccttcgttcagttcgttccatgccgcatcaaactgctgccgtgccgtctgttctgccgtatccagctgcgcctgtgcctcgccgagcgcctggattgtcgcccgcacatttcccagtcccattgcaagctgtaccagctgatcggctgtgggttgctgcagcgcctccaaaaacgcactctggctgtccgccaccagtcccggcaccgccgcctgtgcctgcgaggcatcctgctctgcgaccaccgctcttgctacgggtaaatacgcctccactgccgcctgcacataggcgtcccaggcctcagcgggccatgcttccccgtacgcctggatgacctcctgcgcctgcgcttccaatgccgcctccgtctccgctgcctgtttactgctctctgtaagctgtgcgcgtgccgcgtctaactgtgcataggtttcctcttcctttgccgaaagcgtctgcttaccggatgccacctgcgcctcgccttccgaaagctgctgctccgctgcatccagctgcgcgctgccatcggcaatctgctgctttcccgcggcaatttcatctctcgcttccgcaaaaccatcctccgcctgctgtttttccgcatcaaattcctcctggccgtcggaaagttcctgccagcccttatccagctctgctctcgcatcggaaagctgctgctctgcctcagcaaaggactcttccgcctccgctttcgcatccgcaagcttctctttcgcctcatccgtgacttccacgtaccgtgcctgctcccgattttccttaatctgcgtttcaatcgcatccgtcacctgtgcgaccttttcctcataggcatcggaatagcagaacaattctgcagcaccatcgacggtaaggcagacttgtgtgtaaatatcgctgtctgccgcctccggcaagatgaacacagtgtcatcctccgactgcccggagcggaacgccgtcgctccctttgcattgttgacatcctgcacatccaccacaattcccgttacggtaaagcggctgcagagcagcgaagactcctcatcatctgttgtatccaccgcgatgacatccccgatgccgcatcccgtctcatcggcaaacgcggttgtaacggcggtctcatccgcactctccggcagcctgccggacaacacatacggctgattgattcccctgtcattcaacgtgcagactgcaatgctgacctcatgatcgtttactttcgcatgtaccgtctcactgtagacgccgaccgcatccgcgacaccgtccagtgcctttaacgcatccacatccttctccgtaagtccgagcgtcgagacgacactgatatcgtacagtccctgtctgtcataaaactgatctgccgaatagcgcagatccatgcaggcagcccgcaatccggtgagcattccgacacccagaatcgtgatcagcatgatggagaaaaaccgttttttccccttgcggatcgcccgccatatctccttattatatgcactcttcatcagtatccctgcctttctcttctgccccgctaccactcgatctccgcgatcggcgtagggtgcgcattgcaggtaatctctgtcacctttccgctcttaaagcggatcaggcggtcagccatcggtgccagcgcagagttgtgcgtaatcagaagtaccgtaatcccatcgttccggcaggtatcctgcagcagctgcagaatctgttttccggtgttatagtcaagcgctcccgtcggctcatcgcagagcaggagtttcggattcttggcgatcgcacgcgcgatagacacccgctgctgttctcctccggaaagctgcgccggaaagttatttttgcggtccgccagtcccacttttgtgagcatctccccggcatcgagcgaatttctgcacacctgcgccgcaagttccacattctctatcgctgtgagattcggcaccagattgtagaactggaatacaaacccgatatcggtacgccggtatccgacgagctgctttttgttatactttgcaatatctctgccatccaccttgatctcgcccgcagtcggcacatccattccgcctaaaatattgagcgccgtcgtcttccctgcaccggaggaaccgagaatcactgccagttcgcccttctccacagaaaatgaggctccatccagcgctttgatcgaagtctcacctgtcttatattccttcgttacattattaaattcgatatatgccataaaaggccgcctttcttcccagactctgttttttatctctatgcagattccattttctatgcctaatgtactccccgcgctgcctttcatcaatcaacagattctccgcacgtgttaaaaaattgaagacaacacgttgtcgtgctataatttacgtgaagacaaaatgaacacaaatcttataccgggaggttttcatgaaaaagcagccccatatcacagaacagaccaaaaataatctgcggatcgctttctggtctctctacgcgcaaaaaccgatagaaaaaatctccatcaaggagattaccgagcttgccggttacaaccgcggcaccttttatctctactataatgatgtatatgatcttcttcatcagattgaggaagaaatcctcgggaaaattacagatgttctgaatgattctctggaaaaaaatgatacctttgacctttccggtcagatgggaattcttttagatctgatgcagacatatgaaacctatgctgctgtactcttaagcgatcatggcgacccgcattttgcgacccgcctgaaagaagtggtatggcccctcttaaaccgttattttgttccctcggagggacatgacgattacgagatggcacttcttgccgatttttacctgtccggccttctcgccagtgtcattcgctggctgcagaaccctaaaatgacactggaagaatttttggattttatggtgggaaccattttccctatacctgattccccacaatcttataatagctgcgggaagtcagtgcaaacaccagcagataaatcagcaggaacaccaatgccgtagccgccacgcacagggcaaacagcgcggtattgttgaggctgaacgccgccagaatccatttgatcatcgggaacgccatgacaacatgaagcactgctgccccgatcggcaggaaaaataccgtgaggatctgtgtgcggatactccgctttacctcggcattgctcatgcctaccttctccatgatggcataccgttccttgtcctcgtagccttccgagatctgcttgtaaaaaatgatcagcaccgtcaccatgaggaacatcgcacccagaaacagaccgataaaaagcagaccgccgtttaagctgtagtattcatcccggttctgtgcccggcactcgacatacgttctggaataagagtcctttgtatcatccgacggatgcccgtcattgtatgacgagatcaccgagtgaagcgcattttccgctgccactttttcttctgctgttccgtctatgtcaaacgccatattgtatttgatctgcaggcttacacgctcctcgtcccagttctgtttcaactccgtaaaaatctgtcccagtgtctccctatccggcacaatcataaatacactgtcgtctgccatgtcatccagataatcgcgctccgcttccggatatgcgcagatctgttttacctgatatatctcattgtcgagcgccagcgtccctttttcataggaagaggatgacgccagtgcaatctcccctctttcaagttccccgaccgtttcaccggtataattctcccagtcggatttgggcagaatcgtgagcagcaccacatcgttgatgctgtaatctgtgcctgctccgatgccggtcacggaaaatccatcgtccgtgcgcaccgcggtcagagacatgttcaacatggcgctgtgccccgtcagcacccgtccggaatcctttaaggatgcttccgccagtgcatccacctcctccggatattccggcattgcattatagtaggacaccactgacacctcatgtgcaaaacgccgctttagggcatcttccactcccagatacatacacagggtggtggaaaccgtcaccagaaccatcgtcgataaaatacagatattggcaagccccaccgcattctgtttcattcggtagatcataccggaaaccgtcgtaaaatgtcttgatttgtaataatagtttttatttttccgaagcagtttcagtaccgcaatactgcccgcggtaaacagacaatacgttcccagaatcacaagcagcaccgccacaaaaaacatggtaatggcagagactgcgtccgccaccgtaagcgccagataatagccgccgccgagtgccgccgccccgatcaccgccagcagcactttcgtcttcggctcccgctctcccgcattggcgctgtgcagcagttccatcgggttggaaagctttatctgcataaaattatagaaaagcgtgaccgcgtatatgcagccgaaaagcaccagcgtgtggtggcatcccgtcagtgaaatggtaaacggaacgctctggttaaatcccgtcatgcggtacaaaagcatcgtcatcagtttgccaaatacaatgccgaacgccagcccgccgccgatcgtaaccgccgccgtaaacagcatttccagaaaaagcaccttggcgatatgcttcttctccattcctagtatattgtatacgctcaattcccgcttgcgccgcttcatgataaagctgttggtatagaacaggaaaatcgccgcgaacagtccgacaataatcacaccgagcagcagcgttaccgccacattggcgccgcctcgcatctgatccagccccgggttatcctggatggactgtaccagatagaacatggctgccgaaaacacccccgccagaagatacggcaggtaaagctgtctgttattgcggatattgactgctgccagtttcacatataacttacgcatgacagcctccctctttgccggtggtaagaaccgtcagcgtatccgaaatccgcacatacagttcctcattcgtcatattgccccggtacagctgatgaaacacttcgccgtccttgataaaaagaatccgtttggcatgactcgccgctttcgtggaatgtgtcaccataagaatcgtctgtccttccccgttgatcgtgccaaacagctttaacagtccgtcggtcgccctggaatccagcgcccccgtcggttcatctgccagaatcagctgcggacgggtgatcagcgcgcgggcaaccgccgccctctgcttctgtccgccggaaacctcatacggatacttctccagcagcgcgtcgatcccgagcttttcggcaatcggccaaagcctctcctccatctcctgcaccggcgcatctgccaggacaagtggcagaagaatgttatcttttaatgaaaaatgatccagcaaattaaaatcttgaaaaacaaagcccaggttctcccttctgaatttggaaatctccctctcgccgagtgtcacaatgttcttattattcaacagcacttcccccgccgtcggtttatctaacgccgccagaatattgagcagcgtcgtttttccggaaccggactctcccataattgcgacatactcccctttttccacggaaaaattcagatctgcgagcgcctgcacctgatttcccccaaaccttgttgtatatatttttttcagattacgaacttccagaattgccatatgtctctctcctttccttgactgtacccagtataacaaaacagagaaatgcaagccatttctttggattacatttctctgctgtttcttacgtttttgtaagattcttctatgactcttccggaaagccgatcgtcacccgggttcccgttccttcctgcgatgtgatcgtaaagctgtgccccagcttttttaaaatcgtgctgcaaagatacagcccgattccggtcgatttctggttggcatgaccgttatagccggtatagcctttttcgcagactctcggcagatcctccgcgcgtattccgatccccgtatcggtaatggtaaggcgtcccttctccatcccgatcgtgatgctcccctcatgcgtgtacttgagcgcattcgacaacagctgctcaatgacaaagccgagccatttttcatcggtgagcacacgtgcccccgtctcctcgtagtgcagtgtgatcttcttgctgataaaatgtctcgcatagcggcgcaccgccatccggatcactccgtcgagatctgtctgccgcagcacaaagtccgtggtctccgatccgagacgcatatacgaaagcgccatgttcacatactgctcaatcgcaaacagctgctgcagttcttcatccctgcgcttctccctctgctgctgcagcctttccctgtcctctcccaaaggctcctcttcaccgggaatatccacctcctcctcgattaaaagctttagcgccgcaatcggcgtcttgacctgatgcacccacatggtatagtattccatcagatcgcgcttttcgctgaccgccgtattccagatacgcattttctcctccgccaaaagcccaagcagccgttgataatcctcttccaggatttcgccgggttccggaagattctccagcgataccgttattgactgccgcaatgccagcagttccctgtgccgtctgccgtaacttatcccatccatcgtcactgcaaccagcaggattcccagacacaacagcatgccgtaggcaatctccccggcaggcacttcatttaaaaataagactgccgtcatcacgatcccgcagccaatcactgcggcaatccatttcagacggcattttatgtaagatcttcctattttctgcttcatcaaaatcccctacccgatatggtacccgattcctttcttcgtcaaaataaaatccggaagtcctgctgcatccagctttttccgcagtcttcccacgttgacggaaagggtgttctcatccacaaagctgtcgctttcccacagcttcgtcatcaacgtatcgcgggacacgatcttctccttgttctccatcagcacctgcagtatcttaagttcgtttttcgttaagtccacccgcgtctccccgcaggtgagtgtcgcatcgcccagatttaagagtgcgcctctatgctccagtaccgtattctgacccgcaaaatcataggtacggcgtaaaagcgcctggatcttcgcggtcagcacatccagatcgaacggcttggcaatgaaatcatcaccgcccatattgaccgtcatgacgatattcatattgtccgacgccgacgacacgaagattaccggaactttcgacacctccctgatcctgctgcaccagtggtacccgttgtaaaagggaagcttgatgtccatcagcaccagctggggcgccgcccccgcgaactccttcatgacgtcggaaaaatcctccacgcagaccacatcataatcccagctttccagatgcttttttaagcttcgcgcaatgatctcatcgtcctccacgatcaatatccgatacattccctctcctttaccacagttccgccagttcgtagatcagcttctcggtcttctcccagccgagacacggatccgtgatcgactttccgtaacagccgtcgccgaccttctgcgcaccgtcctcgatataactctcgatcatcaatccctttaccagctttcttatctctcccgacaccttacagctgtgcaggacatccttgctgatccggatctgctccataaactgtttgctggaattggagtggttcgtgtctatgatgaccgccggatgcgccagttcatgccccgcttcccgtgcctcctcataatgttccagaagattctgcagatcctcataatgataattcggaatatttctgccaaacttgtccacatatccgcgcaaaatggcatgtgcatacggattgccggtcgtcttgacctcccatccgcggtataaaaacgtatgtccgtgctgtgccgcaatgatcgaattcatcatgacggaaatatctccgccggtcggattcttcattcctgccggaattcccacaccgctcgccgtcagcctgtgctgctgattttctaccgagcgcgccccgatcgccacatacgacagaagatccgaaagatagcggtgattctccgggtagagcatctcgtccgcgcaggtaaagccggtctcttccaccgcccgcatatgcatgtgacgaatcgcgatgatcccctttaacatgtccgattcccgctccggatccggctgatgcagcatgcccttgtagccgattccggttgtgcgcggcttgttggtatagatgcgcggaatcataaaaatcttgtccgacactttctcctgcaccgtgcggagtcttgaaatatagtcgatcacagcatcctcattatccgccgaacacggaccgatcacaaggatcagtttgtccgattttccttcaaaaatatcccggatctcgtcatctctcttcgccttggtggctacaatctgtgcactgaccggatgctgctcctttaactcctgcggtgtcggcagcttccgtaaaaattccatctccatttccatatctattgatcctttctgtcatacgcgctgtcgcatatgttatcttccgatattttcacactgcaacgcgttgcagtgtgaatccacctaagtatgatacagctttataccgggactgtcaacctcttttcactataaaacataagattccgcgttgatccgtactccgtcaaatgcgtcttcttcctctttggagccttttcccggatccgtattgattctggcaacattttcgctgaccatctgtaccgcctgcttctgcgcctcgttacagatgatttccatacaatctttaaacttcaatttttcctgaatctgccctgccgtcagatcatcctccagaatgacctgcacacaatcctgtatcgtgatgccaagaggcgtctcatccagcagatccggtcccacgaacgctttcaggcggttcgcaatctgcagtccgctccggacgatcatcatcttgtaatccacgttcagcgccagaaatgcgtccttctgctccggcagaagcagtaccgtcccgttgacgtacaggtactcgatctgtgcgagatacggtgtgctgtttgcatccagactcagatcgccgttaatgtaaagcttctttccatatttgcgcagaagccgctcatccagactcacgccgtctacctcatccacataggcacatccatccggcaccacggtaagcgttgtcgcagcccccaccagcggaaccgcagcttccacgttgctctccgtcaccagaagctcctgcgtttcaaaccgtacctgcttttcggcgagtgccgctacatcgagcttttcatccaggagaaccacgcggcgctccgcataataccgtgcccccgcttctgcccgcagcggaaaataggcatcaatcttagcgcttcccttcaatataatacaatcatccggatacacacttgtttttccgttgaccttcattctggtaagccccgccgaaagactttccgggtaacgcaccgaaccgttgacgataatcgcaaggtaattttttaaaagttcctccgtgcccggtgaaatggcaagtcctccgttgaccaccagcactgtttttctcgccggcatctggccacatttcagttccatccagccgttctgcacctgcacgtccacatcgccctctgcctccacgatattatcgccattcagctggatcggataccggctcagattccttctggcatcctcgttcaccagcagcacgtccgcattgatcacaacctcatcgtacgggtcaaacagattctcgtgcatctttctcgcgtcacatacctcacaattcaacagataacgtttctttttctccatcctttaatcctcccactctctctgcaaatgctttctcgccgaagcaagccgcatacgcaccgtcgccggcggtattccgaaaagctcccccagttccctggaattgtagccttccagataacgcatggtaaacaggatgcgctcttcttccggcagcccggaaaggagctgtgcattttccaattctccataatccgtgtaccgtgcttcctccggcagttctgccatcaccgcctcccggcgctcacgccggaaccggtccacaaacagatttttgaccgtccggtaaagccatgctctcccctgcgcaagatccatgccgtccagctcctgcgtatgatgcagtgcgcggtaaaatgcttcctgcaccagatcctccgcggcagattcgttctgtgtcatacgcctgcaccaccggatgagttccgcatgatatttttcatagagatcttcaatcaccgcttcccctcctctctgactgccttcctatagataacgtttgacagcgggaaagtgttgtattttttcagatttttggacgctctttttctctctggtccaattcacgcagaaaatgaagcgcaaacggcagcgaaatgaagaaggataaaatatcggcgaccgtctgcgagacctcgacgccggtcagtcccatggtatttgacagcagaagcagtaccggaataaaacacagtccgctccgaagcatggcaagcagcgttgccctgccgtttttcccgatactctgaaacatcatgttcgcgcagaccgtcatcggctggaagaacagcgccacaagctggacgcggagcgcaacctctccgatcgccaccacctcgggatcattctgaaataccgccacaagctgcgccgggaaaaacatgccgagcaccgcaatcgcgccgagcaggacttcccccgctgtgatcgtgaaatagaagcccttcctcaccctgccgtacttttttgctccataattgaacgccgacaccggctggaacccctgaccgattccaagtccgaccgagaagacaaacatgcaaatccggttcacgatcgacatggccgccaccgccgcatctccgtacacacccgcctgcccgtttaacatcatcgtggacacactcgacaatccctgccgcatcaggctgggcagacctgtcttacagatcatgagcacttcttttggctctctggtaacataccgcagcgcgagccggctctgcgtcttattgcttgaaaacatatagaacaggattccaaaactgatgagctgggacaccgccgtggagattcctgctccctccaccccaagatgacaccgcgtcatcagaaaccagtccccgaagatattgatgacacttcccgagatcagccctaccatcgcaagcgctgcccgtccttcgtaacgcagaatattattcatcacgcagctgctcgccataaacggcgccgcaatcagaatgaagatggcatacgtctttgcatacggcagaatcgtgtccgtacttcccaacaagcgcatcagcggttcgagaaacaaaagtcccaataccgtaatcaatcctccggcagccagcgcgctcacaaacgaggtcgacgcaaaccgcgtggcgctctctacatccttcgcgccgagccttctggagataatacttcccgctccatgcccaaacataaatccgaaagcctgaataattgccatcagtccaaacactacgccgaccgctcccgaagcacttgtcccgagctccccgacaaaataggtgtccgccatattataaatatttgtgaccagcatgctgattgtcgtcggtatgccaagcataataatgagctttgacaccggcgtctccgtcattttttcatactgctttttctctgccgcacgccattcctctgtctcctgcttcatttgtttcacatccttatcatcatttaaaagaatagttacctaaactatagcacaatatttcttctacaccatacactacaggtatccatcagattccatcctataagaaaaaaaacgcttaacacgacgcaaaaaaagcgggaagcctttgtttttttgctttccgcttatcttcttcagtgagacacgggggattcgaacccccgacaacctgattaaaagtcaggtgctctaccaactgagctagtatcccatattatttttaaacaaaacacaatgcccagttccggaatcgaaccagagacacgaggattttcagtcctctgctctaccaactgagctaactgggcacaaatgctttcgcattgagttgcgggaataggatttgaacctatgaccttcgggttatgagcccgacgagcttccagactgctccatcccgcgctatgaagttacttctgataatacttgttatcaaaagaatgggcagaggtggattcgaaccaccgaagcaatttgcagcagatttacagtctgtcccctttggccactcgggaatctgcccatttacacacaatatgaaattatgtgaaaagccgatgatcggactcgaaccgataacctgctgattacaaatcagctgctctgccaattgagccacatcggcatatataataagaaatgggacctatagggctcgaacctatgaccctctgcttgtaaggcagatgctctcccagctgagctaagatcccatataaaaacgacccaagcgggactcgaacccgcgacctccgccgtgacagggcggcgctctaaccaactgagccattgggccataaaaattgtaccttcaaaacttcacacagaaatcatccaacaaacctgcgaacattgttcgctatatttggtcaagccctcgatcgattagtaacagtcagctccacacgttaccgtgcttccacctctgccctatctacctttttttgcttttgtggagaaaagacggatggattgtaaaaacagaattataaagttgcgtgaaagcacaggactgaatcggaaagatttttgcaagctcgtccatattccttaccggactatgactgaatgggaattggacaaccgccatgcaccggattatgtgctgtggcttttggagtattatatccgcaacgagggacttatggtaaaaggaaggaatgagggaggtggagattctgaaaaagaaacaacttaaatgctatctttatacaagagtgtccacctcgatgcaggttgacggatacagcttggatgcccagcgtgacaagctgcggaagtatgcggcatacgaggatatgatcgttgccggggagtattctgacgagggcttttccggaaagaacattcaagggcggcaggagtttcaacggatgctgaatgacatccaggacggcaaagatgatgtttcttatgtgttggtctttaagctgtcccgatttggcagaaatgcagcggacgttctgaattctttgcaactcatgcaggatttcggtgtcaatctgatctgcgtggaggatggcattgacagctccaaggatgcaggaaagctgatgatctctgtgctgtctgcggtggcagagattgagcgagaaaatatccgcacacagacaatggcaggacgtgagcaaaaggctcgtgagggcaaatggaacggcggtttcgctccatatggatacaaactggaaaatggaaaccttgtcattgcagaggatgaagtggaagtaattcgtgtcatttatgaccgctacattcacactaatgagggtgttgcaggagttgcaaaatatctgaaccgcaatggttatactaagaaactaagacagaataataccattccgggattttcaagagattttgtgaaaaatgtattgtacaatcctgtttatatgggaaagattgcttacggcagacgaagaacagaaaagaaacagggtacaagaaacgagatgcacgtggttgagcagtcggagttcccggtttatgaaggacaacacgaagctatcatttccgaagaggattggtatctggcacaggaaaagcgcaagatcaattcttttaagcgggaaaaggttaacaatccagaccacgcacacatcctgtccggtatcttgaaatgcccatgctgcggaaagagtatgtacggcaatatcgccaaggcgcacagcaaggacaagaaaacacggtattattactactgcaaaaatacggttacaccgacagggcatgagtgcagtttccgtctgaatatcgagcagacggaaatcaacaaatttgtggcgaaggttatctccgctatggtcaataatccacggtttgtagaagcgattcaggcgaaaatcggaacagcagttgatacagaagatatggaacggcagattgctgtcctacaagggcggctaaagcaagcctttggaacgaaaagccgcttggagcgtcagatggataccttggacatcaatgatgcccactatgacagaaagattttggacttgcagcgccgctatgatgagcagtatgacaccatagaggaaatcgaagttcagattggcgaattgcaaagtcagatccgcagcatccagcaggagaagatttccggagacaatatctatcgcttgttgctggcatttgatgaagtctaccattccgcaacggaagcggagcagaaggagtttatgaaggcctttatcgagcgaattgagatgttcccggagaaaaggaaagacggaagctggataaagaagatcgtattcaattttcctgtgcctgttgatggtgaggaagtgaaagaacttcccttggaaactgaaacaactgctgaccatgggaaaaggcgcagacattttcgccttggtcagcagaggtcaccgcagtgaccgcattccccctcgggagagccctcggagagcccacggcactttgcagccagtatggatgaaagtgtcatagtgggttattacactttgaaaaagtgccgttctccagccttccgctgttgcaaatctcaaagaaaggaaaaatccaatggcaagaaatgatggaatagaccgtaccgtagccagaaatcaggacttggaaacaccggctgatgtggcgaaggtacaggaacacaatgagcgtgaaaaggacagctacagcaatcaggacataagaaaaaagcctgaataatcaggcctatttcttatgcaaaaaaatcaaaaattgtgttgacatctcttaacaggtcttgtaatattccttatcgcttcaaggcaaactggctattcccgatgcgacagtcctttcttctgcctttatgcgcggaggtgttctttgatggtttcaagaacggaatagggaatgtagagatgcccgcgtccggtcccgatctggattgtgggtttgttggtgccgtggaagtcagagccgccgctgatgagaagcccgttctcttttgcaagccgcttgacgtactgttcctcgccggtggtgtaggtcgagtagatcgcctcgatgccgtcaaggtggacttcttttaactcgtcgatcagatgctgtaaggtcgtctggttcatgtggtagagcagcggatgggctaatacagcgatgccccctgcggcgtggatcagttcgactgcctccatcggggagactttaaagcggccgacatagcatttgcagccgtcgccgatatatttttcaaacgcctccgagacgctcctaatctgatggctgtcgtagagaaaacgtgcgatatttgcgcgcgtgatgacactgtcgggattggcagcaaggagtgcttccgtggtaatggaaaagccttcgcgctgcagggcagccactattttttcattgcgcgcatcacggcagcggcggaactcgtttgttttctcgataaggagcgggtgctccggatcaatgtagagaccgacgatatggacttcttttccaccgccggctctggtgggcagctcatattccgtggaaagctcgatgccggggattaattcaataccacaggcggcagcggcgggagcagctttagagacacctgccgcggtgtcgtgatctgtgagcgcaaaggcggacagaccggcagcctttgcggcagatacgatctcggtgggagtaagggtgccgtccgactcggtggagtggacatgaagatctatgatgcggtgttccatggtaaaatcctctcttcagataatctaattcagactaatcatagagaaaaaaatcacatttgtcaaaaaaatatggaaaccagttgaacacgtagtaaaatagaactataatataaaggtactaaaaaatatacacggatgtagagaatacagcacacaggaggagcgaaattgtttgaaaatgtacgaatcaaagagagactgacaaaagcatttgttatggtggcggcaatcactgccataggagcggtagtcgggctggcagcgatgcttgtgatgtcgaaccgttattccagcgcacttgtgaattacggtttttcacagggagatatcggcaaggcgatgatcacatttgccaacacgagatcagcgaccagaggaatcatcggatttgatgagcagggactgttggatgatgccatgacagaacatgacgaacagaaagcaaagttcgagaattacttcgcaaccgttggggatgtagtaacgacgagcgaggaaaaggcactctaccagcagatttcagataaactgcagcaatactgggcagcggaggaaccgatcatcgagcagggtgcaaccaccgatgctacacagtccacagcggcacagcagcagatgaaggaaagtctggatccgatctacgaagatatctatgcagatatgatagaactgatgaatacgaaagtgacggagggagaccgcttgtcctccactctgacggcagtcagcgtgattcttgcgattgtgattgtggcagtgtcagctctggcaatggttatggccaacaagcttggcaatcaggtggcaaagggaatctccgaaccgcttgaggcacttggcgagcggtttaaaatgtttgcacagggagatctttctactccgttcccggaggtttccacgcaggatgaggtcgcagacatggcgcgtgaggcggcagacatggcagataagctgaatcttatcatcaatgatgcgggaagaattctcggattgatgtcacagggcaattacgcagtgcagtcggagcacaaggacggttatacgcttgattttgaaaaattgattgtagcgatgcgcgttctgcgcgatcagatgatagagacgctgacatcaatcgaagatgcggcaaaccaggtttctgccggttccggcaaccttgcagaggcatctcagagtctggcggagggcgcaacggatcaggcaggagctgtggaagaactgcaggcgaccatcacaagcattacagagaatatccagaagaccgcggagcaggcagaggaatcttaccagcaggcaaagcagtatgcaggtgaagcggatcagagcaagaatcagatgcagtccatgattgataccatgagccgcatcaacgaatcttccaacaagattggaaacattattacagatatagagaatattgcgtcacagacgaacctgctgtccttaaacgcttccattgaggcggcgcgtgccggcgaggcaggaagaggattcgctgtcgttgcagagcagatccggcagctagcagagcagagtacacagtctgcggtggacaccagagagttgattgaggcttccctcaaagaaattgaagagggcaatcaggcagtagagcgtgtgtccacgtctcttgaagaggtaattgacggaatcaagcagattgcggagacttccaagcgcttgagcgataattccaaggatcaggcagaagccatgaaacaggcggaggagggagtcaaccagatttccgaggttgtacagtccaattctgcaacggcgcaggagtcctctgcaacgagtgaggagttgtctgcgcaggcgattgcactggatgagctgattggaaagtttgtattaaaaaattaaaaattgacagattctgcggttgccgaaccgaaagaaaagggatataatagcaagaagaaaagtttcagaacaggggggaagtcacatgcagctgctgacatttacattaacgggaatggattatggaatatcacttgagaacgtggaatccattgagagtaagatgaatgtcgtggttgtaccgacttctcctgccaatatcagaggcatcatccgccttcacggagagatcctgccggtgttttcccttgcatccagatttggactggggaacattgcggtggacaaccttgtggttgtcaatgtgggcggcatgaagctggcacttgaggtagaaaaggtaaaggaaattgtggacgtggaagattccagagtgcttccgatgccgacactgatgagcggacagcagtgctgttttaatgatgtggcttcctgccagaaggagttgattgtgatgcttgatgtcaagagtctggtatcacaggaggagcaggcggcgatccgcaagatgatcagcgacaacaccagtgaaaaataataaaaaacacttgacacggatacgtgtgtgtgataagtttaaatagttgttagaaaacaaagtagagtatccactctcaccggagcacaaatacgtgactcatggttcatatttcaaagtattgcgaacatatcatgttccgggtttgaatgtttagtggatagtctgcctatccacttttttatttggaggtacgataccattagcgagttaatgattaacgaacagatcagagacaaggagattcgtctgattggagagaacggagaacagcttggcattatgtcagcacgcgaagcaatgaagctggcggaagaggcagagcttgatctggtgaagattgctccaaccgcaaagccacctgtatgcaagattatcgactacggcaagtacagatatgaactggcacgcaaggaaaaggaagccagaaagaagcagaaagtggttgagatcaaagagattcgcttgtcgccaaatatcgattcaaacgatttgaacaccaaaatgaacgctgcgaagaagttccttagcaagggagacaaggtgaagatcacattgcgcttccgtggacgtgagatggctcatatgaatgcgagcaagcacattttggatgattttgccgcaagcctcggcgaaatagcagtagtggaaaaagcaccaaaagttgaaggtagaagcatcagcatggtgttggcagagaaaaaatcataattaaggaggaacatatcatgccaaaaatgaaaaccagcagagcagctgcaaaacgtttcaaagtaacaggaacaggaaagttaaaaagaaataaagcttacaagagacatatcttaaccaagaagacaaccaagaacaagagaaaacttcgtaagccggcaatgaccgatgcaacaaacgttaagaacatgaagaagattttaccatatttataggaataagttaaggaggaatgcaaaatggcaagagtaaaaggcggattaggcgctaagaaaaagcataatagaacattaaaattagcaaagggttacagaggcgcacgttccaagcaatatcgtgtagcaaagcagtctgtcatgagagccttaacaagttcttatgcaggcagaaaagagaagaagagacagttccgtcagttatggatcgcacgtatcaacgcagctgcaagaatgaatggtatttcttacagccagatgatgcacggattaaaggttgctggtgtggacatcaaccgcaagatgttagcagagatggctgtaaacgacgcacagggatttgcagcactggcagagctggctaagagcaaggtagcttaaggaacagcagacagaacctatctcgtatgtgggacaacccatatgagataggtttttttatgtaacaggaaagcaggattttttggtatcggtattatacagcatctgaattttgtatgttccaatttacagcaatatacggtataatattagcgatttttgaacgcaaagggaactacgaaagggaaacgggaatatttatatgaagaatatatggcgtatttttgcaaaagacattaagggactggtgaagaatccattcgcaatgattattgcgctgggactctgtgtcattccatcgctgtatgcatggtttaacatctattcaaactgggatccttatgcgaatacttccaatatcaagattgcggtcgtgtcggaggataaaggatacaccctttcggatggaacgacagagaacatgggcaatgaagttgtggaggaactgaaggagaataccaagatcggatgggtgttccttgaggattcggatgccgcacttgaaggtgtcaggaacggagattactacgcggctgtcatcatcagcgatagctttacatacagtatgtataatgtgttcaaggagaactttaagaatccgacgatcacatattatgagaatgaaaaacggaatgcggttgcaaccaagattacggataccgctgtatcgacggtaaagcagagcatcaacgagaagtttatcgaggtggttgcaagtaccatttttacacagacgaacgaactgtcctctgagatggagaatcaggatgtgttcagcgaatttgagggcaaactgaccaacctgaacaacaatctgatcggttacagtgatatgattgatgagtttatttcggcgaatgcagtgctggaggcagagatcaaaaccgcagacggagaactgccgaagctcagcagccagattcagaatggcgagaagagtttccagaattcgcagagcaatctgaattccacgaaaacttcactggagaatttcagcagcaatgtgcagacgacactggatggcatcaatcattcgatcaattccatcacaacggatatcaacaacgcgaacctggcgcagaatgcgcagtctacggcagacaatctgaacaagacggcaaccgatacggcggaactgatccgacagttaaaccagttgaagaagagtctggcagatcaggcggcaaattcatcgggaaccacaggctccacggagggcacaggctccacggaaggaacaggctccacggagggtacaggttccacagaaggaacaggctccacagaaggaacaggctccacggaggggagcggttccatagattcgatcgtgtccgatgaggtgaatcagcagattcaggagatcttaaataccttaaacagcatgaacaatggtgctgaggatattcagaatgcattaaatgctttgctccagcagggcggtggtacagacggctccggtcagattgttgcggatatggtgaacagatctgtggcaagcgtgacacaggtgttaaacaactgcagcgagtcgatcaccaatctgaagaatatgtataccaacagtcttgttccgcagatggacggagtgttaaacagtgtatcgcagatgctcggcaatgtgacaaagcttctggataacttaaataccgcagtaaatgatatgggcgtggtgtttgacggaattcagacaacggtcagtgacacgacggagagccttgagcagatccagaccgtgattgacaatgtgagcacaaagctgacggaactgatcaaacggttggagagtgcggaagatgatgaaaaagtagatgcactgctgaagtttttgcagggtgatccggaggattacggcgccttctttgcagaaccggtacaggtgacgacacaggagatctacgcgattgcaaattacggatcggcgatgacgccgttctattccgtgcttgccctctgggtaggaggaacgattctggtggcactgatcaaagtgaagccggataccgcagggctttccaacccgaagtcctatcagttgttcttcggaagatatctgctgttctttgtgtgtgggcagatccaggcggcgattattgttctgggagatatttatctgctccactgccagatcctctatccgggcttattctggctgacggcagcactggcaagctttacctttacgctgtttatctatgcgatggcgctggctttcggcgacgtcggcaaggcggcggcggtcgtagtcatggttatccagattgcaggttccggcggaacgtacccgattgagacgcttccggagatttatcagaagatttatatcttcttcccgttcccgtatgccatcaacgcaatgcgtgagacgattggcggtatgtacggaagcgattatatgaagtatctgggagaactgctgctttttgcggtggcggcgcttctgattggtcttgtgatccggcttccgtttgtgaagatcaatcattttgtagaaaagcgtatggaagatacggaaatgatgtaggaaatgggagattttatggaaaagaaagaaaaatacgaacagatgtatgagatgctcgtgacgtatgagcgcaagattcacgagaagaatcaaaagagaatcagtatcggtttaaagtgtattattattattccgttgatcttcctgttccttctgttctggacagagagcaataaggttgtgtttctgattctgtggattgtatcgctgtttttgctggcagcctatctgattctggtggagtatatggactataaccttcaggaaaagttaagcgagatcaacgacgaggggacacgcgtggattccctcatcggactggagattgataatgttccgggaaatctcagaaatgtgattcagaggattgacgacggattaaactcagaggcggagacccggctgattgagactaaggcatccggggaagaaacgcagactgtggaaaaggcacagactgcggaagagacagagaaacaaaaggatgcggatgcacaggctgtagaagatgcagatgcacagaaagatgcggatgcacaggctgtggaagatgcagatgcacagaaagatgcggacacggaggtgaaggagaatgcgtaatatatttaagatttttttcgccgatgtcaagcgcatcagcaccaacgtggtggctgtcgttgtgatcctgggactctgtattctgccgtctttgtatgcatggtttaatattttgtcaaactgggatccgtacggaccgtccgcaaccagaaatcttaagatcgcggtggcgtcggacgacgagggagtcacaattttagggaacagtgtaaatgttggaagcagtgtcatctctgcgcttgagtcgaacacgacgatgggctgggtgtttacggatacgaccgatgaggcgatcgacggcgtctatgatggaagttattatgcggcgctcatcatcccggagaattttacggaagatatgatcagtttcctcggcggagaggtggatcatccggatattatctattatgagaatgccaagaaaaacgccattgcctccaagatcacacagaaggccaagacggctgtgcaggagcaggtaaacagcacggtggtgagtacccttgcagagaccacgatgaaggtgacgaacgccctctcagatgtggatgcggaagattccgatccggcggagagtgttctggtaagactcaataatttaagcagcgacctacagagttacatcaatatattgaactcgtttgtcagcattatgaattccgcccagagtattgtggaggcgagtcagaccatgcttccgaatgtgaacaacatggtttccaacggtcaggcatccatcaacagcatggagagtctgctggttgcgggcaacagcacggtgagttcgacggcggatatggtgtcgtacagctttgacatgatgaacgattcgttaaataatgtgtcgtccgtcattaccaatgcgttaaaccgtctctcggagtattcccagggcacttctgtcacggtacagggcttatcggcgatgatgccatacgtgaggcagctgtttgatacttcggtatccgggtgggaggatacggcgccggaggacatgcaggcgcagattaatgcaatccgcacgcagttggataccatcactgcggacctgacagcgctggagaacaatgccgatacatcgatggagacggtaaggaatctcagtaataaaattgtgacggagattgcaaactgccagaaagcggtcgatggactgcgcaatgattttgcttacaatgtcaagccgaagttagagaacacaatgagctccatgcagcaatccatgattgccgcagcgggtattttagacggcgtagatgccgattttaacggtgtggagaatgcactttccgattatcaaagcacgcttgagcgtggaagcaacagccttggcggatcactgtccatggcgcaggagcttctcgccaagctaaacagcgtcacggcggatctggtaagcttacagcagaatgaccagtatcaggagctgcttgaaatcgtaaagagtaatccggaggagctgggagcctttatttcttccccggtaaatctggagacggtcggtatctatgagattgaaaactacggctcggcgatgtctccgttctacacgatcctcgctctctgggtaggagcgctgattctggttgcgatcatccacgtgaaggtgcatccggttgagggcgtcgaaaatgtgaagccgtaccaggagtatttcggaagatacatgatctttttcctggtggggcagacacagacgcttttaacggttctgggcaacctgttttatattaaaatccagtgccatcacccggtattattctggctggcaggcgctgtggcgagcctggtatttaccctgtttatttactcactgaccgtggcattcggcaatgtcggtgaggcgctagcgattgtggtcatggtaatccaggtagccggtgccggcgggacgttcccgattgagacgctgccgaaggtataccagatgctctataagtatctgccgttcccgtacggcatgaatgccatgagggagacgatcggcggactttataagatggattactggaaggatctcggagcgctcggtatctatgtattgatttcactgtttatcggacttgtagtggcaattccgttccgcaaactcaatcatattatcgagaagaacaaagagggatccggagttatgatatagcaacagggagcagattatgatgcgtttgatacaaatggttcttttactcacggggctgctcatggtggcagctcccggggcatgtacaagaaaagatgaccggggtaagccggagaccgagaagcgcacccgcacgattgggggatggctgactgcggcagcggttatctggatgattacggaagtattgagaagtttttaagttattttgggtattcctaataggtatacccattttttgttcggatattgacaaaaaaaatgtacattgttattatcaatggtaagtgtgatgtgtaatttcagatagtaaggaaggttttcttaaatgagaagacaggtattatcgcttctggttgagaataatccgggtgtgacgagtcatatttcggggctgttcagccgcagaggctacaacattgacagtttttcctcgggagtgacagcggatccgcgctatacgcggattacgattgtggcgagcggggatgaacagattttagagcagattgaaaagcagcttgccaagcttgaggatgtggttgacattaagaagctggagccgggctcgtctgtgacgcgcgagctgattatggtcaagatacgcgccagagatacggaacgccagccgattttaaatgtgacggagattttccacggcaagattgttgatgtgacacacgattccatggtgattgagcttaccgggcatcaggataagctggatgcatttctggatctgctgcaggggtatgagatcctggagctggcaagaacgggaattaccggtctgtccagaggaactgccgatgtgaagatgatcgacgaaaacggacatctgcagagtttgtaatacatactaattgtgaacgagcggcagacatcacagatgctgttgctatgtataaaaaatggaggaaaaagatatgtcagcaaaaatattttatcaggaagactgtaacctttcactgttggatggtaagaccattgccatcattggatacggaagccagggacatgcacatgcattgaacttaagagattccggatgcaaggtcattatcggtctctacaagggcagcaagtcctggaagaaggcagaggagcagggatttgaagtatatacagctgcagaggcagcaaagaaagccgatatcatcatgatcctgatcaatgatgagaagcaggcggatctttacaaaaacgacatcgagccgaaccttgaggaaggcaatatgttaatgttcgcacatggattcaacattcattttggatgtatcgtaccgccgaagaatgtcgatgttaccatgatcgctccgaaggctccgggacatactgttcgttccgagtaccaggcaggaaagggtactccgtgtctgatcgctgtagagcaggatgcgaccggcaaggcacaggatctggcgcttgcctatgcacttggcatcggtggagcaagagctggtgtgcttgagacaaccttccgcaccgagaccgagaccgatcttttcggtgagcaggcagttctctgtggcggtgtgtgcgcactcatgcaggcaggctttgagacactctgcgaggcaggatatgatccgagaaatgcatacttcgagtgtatccatgagatgaagctgatcgtagatctgatctaccagtcaggtttcgagggaatgagatattctatctccaacacggctgagtacggcgattacatcaccggaccgaagatcatcacagaggacaccaagaaggcaatgaagaagatcctctccgacattcaggacggaaccttcgcaaaagagttcttactggatatgtctccggcaggaagacaggttcactttaaggcgatgagaaagcttgcttccgagcatccgtcagagcaggtcggcaaggagatccgtaagctttacagctggaacaacgaggctgacaagctgatcaacaactaagagctaagagcggagaatgaatccgcaaaaagaatagagaatctgccgcatggagtgcgaagtgcttccggcggcagattttttatttcataggaaataccgtgatacattaatgtgtgaaagtggaacttccctatgaaataaaaaacgctccgcgcggagaatctcgcaagcgagattcttttttatgtggatgccaaaatccggttgacaaatacatccagtatgttaaaataaatcatgttcatgcataaaatgaatcaaagtatgtgaccgtgagaaggagcattaagaacggaagaatgacagagagccgccgggtggtgtgagacggtatttggaagttcccaactcgcctttgagtcctttgccggaagccagtggcagcgccagcggtgtgtaaggcagagcgtgtgattcgcgttaagaatgataagtgcgtacctgcgcatagcgcggtgcgaagcagagtggtaccacggagtagcgttacttcgtctcttacggcagatgccgggagacggagtttttttgttatttcaagcgttaatgaaagatgaggagagagaagatgtcagaactttacaatcacaaagttgtcgagaaaaaatggcagaaagtctgggatgacaacaaggcttttgcggcgacagacgattacagcaagccgaaatattatgcactggtggagttcccgtatccgtccggacagggactgcacgtaggacatccgagaccgtacacggcactcgatattgtggcaagaaagcgccgtatgcagggatacaatgtactttatccgatgggatgggatgcatttggtctgccgaccgagaactatgcgatcaagaataagattcatccgaagatcgttactgagaataacgtgaagcgttttaaggagcagttacattcactcggatattcctttgactgggacagagagatcaatacgacagatccgtcctattacaagtggacacagtggattttcttaaagctgtttaaggcaggcctcgcttacaaaaaagagatgccgatcaactggtgtacttcctgcaaggtcggtcttgcaaacgaggaggttgtcaacggtgtctgcgagcgctgtggagccccggttgtccgcaaggtaaagagcgagtggatgttaaagattaccgattatgccgagaagctgatcgagggactggatcacgtggattacattgagcgcgtcaaggtatcccagaagaactggatcggcaaatcccagggcgccgaggtggatttctccatcaagggcaaggaggataagcttcgtgtatacacgacccgctgcgatacattgttcggtgttacttacatggttgtatccccggagcatccgatcatcgacaaatacaaggatgaactgaaaaactgggatacgattgcggcataccgcgacgaggcatcgaagaagtctgattttgagcgtgcagagcttgccaaggagaagacaggcgtgcagatcgaaggtctgaccgcgatcaatccggtcaacggcaaggagattccgatctggatttccgattatgttctgatgtcctacggaaccggagcgatcatggcagtgccggcgcacgatgagcgtgactgggaatttgccaagaaattcaacctgccgttaattcaggtcgttgcaaagaacggcgaggaagtagacatcaatgcggctgcatttacagatgtggcaaccggtgttctgatcaattcggatttcttaaatggacttgaggtcaaggacgccaaggcaaagatgatcgcgttcttagaggagaagaagatcggtaccgcgaagaccaactacaagctgagagactgggtattctcccgccagcgttactggggcgagccgattccgatcgtacactgcgataagtgcggttacattccgatcgatgagagcgaacttccgctgatgcttccggaggtggagagttatatgccgaccgacaacggagaatctccgttagctgcaatgacggactgggtgaacaccacctgcccgtgctgcggcggtccggcaaagcgtgagacagataccatgccacagtgggcgggatcttcctggtatttcttaagatataccgatccgcacaacgacgaggcactcgcaagcaaagaggcgttaaaatactggatgccggttgactggtacaacggcggtatggagcacacgacacttcatctgctctactccagattctggcataagttcctctacgatcagggggttgttccgtgtccggagccttaccagaagcgtacttcccacggcatgatcctgggtgagaacggcgagaagatgagtaagtccagaggaaacgtcgtaaacccggacgatatcgtaagagagtacggtgccgatacgttaagaacctatgagatgttcatcggtgcgtttgatttgagcgcttcctggtcggaagatggcgtcaagggatgccgccgcttcctggagcgtatctggaaactgcaggatatcatgaccaacgaggagggatactcttcggatcttgagacaaagatgcatcagacgatcaagaaggtaagcagtgattatgagaatctgaagtacaacacggcgatcgcagcaatgatggcgctgctcaatgattttacaaagaagggctccatcacaaagggcgagtacaagaccctgctcattctcttaaatccggttgcgccgcatatcacagaggaactctggcagatcatcggcggcagcggctatgtatatgagcagacctggccggaatacgaggaagcgaagactgtagaaaatactgttgagattgcagtgcagatcaacggaaagacgaaaggaacgctggcaatcggaagagatgacgcgaaggaggatgtcattgccaaggcaaaggaatccatcgcagataagctcaccggcaacatcgtaaaagaaatctatgttccgggaagaattgtcaacattgtaatgaaataagatatggaaaaaggaacgaagcttttagaaggttccatctggaaagggattgtagcatttgcaatccctctcttcttgggaaatttatttcagcagttatataacaccgtcgattctctgatcgtcggcaatttcctgggcagcgatgcgcttgccgctgtcagttcatccggaagcctgatttttcttctggtgggattttttaacggaattgccgttggtgcaggcgttgtgatctccaaatatttcggggcgagagactatgagaatctgaaaaaagcggtgcatacggatgtggcattcggacttgtctcaggacttttgctcaccgtgatcggcatgtttttggcaccgcagattctggtgctcatggggacgccggagtcggtactgccgaattcaatcctgtatttccgcatttattttgcgggatcgcttgcatttgtcatgtataacattgtgatgggcattctgcaggcggtgggagacagcaggcatccgctgtattatctgattttttcttcgatcgtgaacattgtgctggatctgctgtttgtcggtgtccttagaatgggcgtcggatcggcggcgcttgccacggcaatctcacaggcggcgagtgcgctactctgttttatccggctggtgcgcacgaacgatatttatcaggtaaaaatacgggagatccggtttcatccggcgcagcttcggcagattatcagctttggtctgccctccggtctgcagaactcgattatttcgattgccaacatcgtggtgcagtccaatattaacaagtttggcgtgatggcagtcgcaggctgcggtgtgtattccaagatcgaaggttttgccttcctgccaattacctgttttgcgatggcgctcacaacgtttatcgggcagaatctgggggcaagacagtatgaccgggcaaaaaaaggcgcggcgttcgggattgtctgttccatgacacttgcggaactggtcggcgtgatcgtgtatatgctgatcccgtacctggcggcagcctttgacagcagtgccgaggttgtgggatttgcaacgcggcaggcacacgtggaggcgctgttttactgtttcctggcgttctcacactgtattgccggaatcatgcgcggtgcgggaaaatccgcggtgccgatgttcgtgatgctggtttcatggtgtatcatccggatcacatacattacgataaccgtgcattttattccgaagatccaggtgatcttctgggcgtatccgctgacgtggtcgatcagctcgattattttccttgtgtatttcctgaaagcggactggattcacaattttgaacgggcagaacagagataagaaaatgtagaacatggggaaaaagcgatgaaaaaatgggcagaatggctgctggtggcaggggctttatgtatgggtatggcaggctgcggaagtgaagaaaaaaacacgtcgaacgcagatgcagaacagaaaagtgagactgcatcagagacaagagaagaaggacaggcaccggagcagacggatacagaaggaagcgaagaggcagaattacagacaacagagtcagaccatgcagagacgggacttactttcgcagatcttgcagcgctgcagtttgaattttgcagtggtgcaggtggatggtcaacggattttaccattgagaaggatggctctttttccggcgtatatcacgattcagatatgggggataccggggatggctatccgaatggaaccatgtattactgcaatttttcaggacatttcacgaacttaacgaaggtagacgacgatacttatgagatgtcacttgcggatatttcctatcagaatacggtcggagatacagagattctggatgatatgctttatgtttacacggatgtctatggtctggagggaacggataccttccggatctatctgccgggtacgccgagagaaaagctgacggaagacgaatggttctggattgcagcgggaaatgagagcgaaacggaactgacgatgacggtgatcgtcaatgagccgaatgaatatggaatttattcctatgagaggtcaaccccgtcagaggaagcgcagggaatatataatagtctgttgaactacaacgacgaactggaacagcaattacagagtgcctcaacgcagcaggaaatgaatgagattacggcgcagatgtaccagaatagtgatgatagcttaaaccagatctggcacatcgtgaaatataattcagatgagacagaatttgctcagattctggaagaacaaaaaagctggatcacggaaaaagaggcggaggcggaaaagatcagagcggcaaacaatggttcttcggcagagatggatgtcaacataagactcaatgatctcactgaggaacgctgcagggttttgttggagtacttaaaagatttatagaaaagatgagataaaaaagcgggaatatttctctttgtggtgtacatggagaaatattcccgctttttttgttattctacctgaagtagagtgaaaaaatgcagcagatgtagtaggatagaagcaggaaggagagagggtggatgattgataatgtgacgtttggggcatttgtacggactcttagaaaagaaaagcagatgacacagcttgaacttgcaaagatcctgaatctgtcggataaaacgatatccaagtgggaacaggggaaggcgtttccggacattgcagtctgggaagcgctcgcagaagcacttgatgtgacggtggcagagttgtttgcaggagaaaaactgccaaaggaagagggaaaagtcagtacagctatatttgaggatggcattgcagtggcagcaaatgaagtccggcaaaaaaagaaaagataccggggactgttgatgattatggcggcgctgttagtggtggttgcaggtctgggtatcggcaaaagcctgaaagagaaatttgcagtatatatggtcagcatggatgcaactattcttgaggttcatgaagattattgggaagttagaggaaaggtaacggatgccaaaggacgcagcggagtttatgacatcagtctgacagaaccatggtatctggagcacccggtggatggtaaggaaggagatgagatccgctttttttaccgggaggattggaaaaatagaactttgaaagaaaacgaatatatacaagggattttttctatggagaaagtggaggatgagtagaatcgctagttgggctataaaagaaaaaatctccgctgtttatttgcaaatagcggagagtttcctttaaaaattctgatagaactgaatgaactcattgagcgatttggaaggtttgctgttggtgcggtaggcgaaaccaacctcgcgcttgtgaatcggaatgccgagtggaatctccacgagggcaccggaggcgagatcgtcctgcacgaagcttttgatgacgcaggcgacgccgacgccgatcctggcgaaatcaatcagcagatccatgctggagatatcgatggaatcgtgaacaacgatatgattctcctgcagataatcgtcgatgtactggcgtgtcatgttgttctggtctaagagcatcagtgtggaggatgtgaggatctcgtctttgcggacgccacgggcatgcagattgcgcagatagtctttggtcgccacaaaaatatcctcgatctcttccagatagtcaaaatgtatattctttacattgtccggcttcccgatcagaccgatatcgattttgtcatcctcgagcagctttaaagtgtcgttcgtggattgacagtggatggagatcgtgatatgcggattctgccggatgaattcctttaagtagggaagcagcatgtatttgcaaagggttgcggagacaccgatcttcaagtgaccgaccccaagctcaatcgagcgctttaacttttcttccccgagtgtgagcgtctcaaaggcagtcttgacatgctcgtagagcagctgtccctcgtcggttaatactacgccgcgggaactgcgggaaaagagacggcagccgacgctttcctcgagcttctggatggatttgctgatggcgggctggctgatgtaaagctccttggcagccttggagatattgcctgtgttggctaccgtataaaaaatccgataggatgaaagattctggttcataatagttcctttccttgggggtgttgatttcatagatatttgtatctgttctgacaaaagtatatcatgaattaatgttatggtaaatatatttattatgtatttttattatagtatgtgctatgataaaatagtcacgaatcagatgaatattacacacacacgaaaatagagtttgatagtaggaggggatagaatatgggtatgacaatgacacagaagattcttgcggcacatgccggacttccgtctgtctgtgcagggcagctcattgaggcagatctggatctggttctcggaaatgatattacatcgccggtggcgattcatgagatggataagatgaaggtggacggcgtttttgacaaggacaagatcgcgctcgtgctggatcatttcgtgccgaataaggacattaagtctgcgcagcactgcaaatgtgtccgtgaatttgcctgccgccatgacattacgaattattttgatgtgggagagatgggaatcgagcacgcgctgcttccggagaaaggactcacggtggcgggagatgtcatcatcggagcggattcacatacctgtacctacggggcgctcggcgcattttccacaggcgtcggcagcacggatatggctgccggtatggcaaccggaaaagcgtggtttaaggtgcctgctgccatcaagtttaacctgaccggaaagccggcaaagtggatcagcggtaaggacatcatcttacatatcatcggcatgatcggtgtggatggtgctctgtacaaatccatggaatttgtcggggatggcatacagtatctttccatggacgaccgttttaccattgcaaatatggcgattgaggcgggcggcaagaacggcattttccctgtcgacgatctgacgaagcagtatatggagaagcattctaagcgcccgtatgttatctatgaggcggatgaggatgccgagtatgagcaggaatttacgattgatcttagcacgttaaagccgacggttgcatttccgcatctgccggagaacacgcacacgatcgacgaggtgggagagatcaagattgaccaggtggtcattggctcctgcaccaacggcagaatggacgatctgcgcgtggcggcatcgattctgaaaggacacagggtggcaaagggactgcgcgtgatcgtgatcccggcaacacagcagatttatctggatgcgatggaagagggtttgttaaagacctttattgaggcgggggcagtcgtttcgacgcctacctgcggaccgtgtctgggcggttatatgggtatccttgcggaacatgagagatgtgtctccacgacaaaccggaactttgtcggcagaatgggacacgtggagtctgagatctatctggcaagtccggctgtggcggcggcaagcgccatcaccggaaagttatccggaccggatgagattgcataggcgaggaaaggagacagagcatgaaagcagcaaagggtcatgtatttaaatacggagacaatgtcgatacggatgtcatcattcctgcacgttatctgaattcttctgatccgaaggaactggcgacacactgcatggaggacattgacaaggattttgtgaaaaaggtaaaagcgggcgatattatcgtagcaaataagaactttggatgtggttcgtcgagagagcatgcaccgatcgccatcaaggcttccggcgtgagctgtgtcatcgcagagacatttgcgagaatcttctaccgcaacgcgatcaatatcggactgccgatcatcgagtgtccggaggcggcaaaagcgatcgaggcaggagatgaggttgaggttgattttgactccggcatcatcacggacaagacgaagaacacttcctatcaggggcaggcgtttcctccgtttatgcagaagattatcgactgcgaagggctggttaattatatcaatcagaaatagaattaaccttttgggcaatctgttccagataattcagatagcgcctggagattttaagaccggtgtagatatctgcgtattccttcggggagagcgtatcgacatagttttccgggaaatttttttgaatgcctgccgcgcgggcgagatcaacggccttgttgtaggcaatggcggctttttcctcggaggagtagctgccgatctggtaattgccattgatgtggatgacggcgcggtaccgcgggagtccgttctttaaaaactggagcaccccgtggtaacggttgacgatcacaatattggaatagcggaagtcacttttatctccgttgacaaactgatagtctcttccggcaacagcgtaagggcggatgccgtagcgggagaggatggaatactgcatgccatagtcgctgacgaacagatgcccctgccgtttctggatcttgcggctggaatagtagaacaggtcgtcaacgtcaaactttaactcctcgatgcgcgagagatagtagctgaaatagccgttgcgcaggtagatcggattcttaaagtaaatgccgttgttgcggaagttcaaaagcacgatgattttttcaaaggagagggttgtgggctgctcaatataatcttccggcagctgatccaaagagcccagaatggcaagtgcttccagataggcattgcctgcggtggtctcatccgcatagcttccgagactgatatgtttatttttgtaatagagaccggcacggtagtagaccgtgccgtctttttttgtggcgatggatacaccctgcgtcatagaccgctccttgtttaccgtaaaaatattatgtaaataagcattaggatacacttttgtgatgagtatagaataacagaaggaaagacgggatgcaatagcggaaatccgattgacgaaaatatacaattttgctatactaagaagagttagatgtgtgcaggatgtcatatattttggaaggggccattcttaaatgaaaaaaatatcaacaaaagtattgatcccggtagtgctgcttgcagtgattgcagtcatttcggcggtaaccggattaaaaaatgccaatgagctgcataccagcagcaaggagatcagtgacacaacggtgaatcagctgatgctgttaaatgacatttcgtcgaattttaagagcattgatgcaatcacataccggatgtgcgtgtccacgtccaaggacgagcgcgatcagctgatggagcaggtggatcagtaccgcacggacattcagacgtcgattgattcctatgaggcgctgacacagacgcaggaggaagctgcggcaatggagacgcttcgggagaattttgccgattacaccgaggtctatgaccggattgcagactttatttcccgcgggaataaggacaaggcgagacagatatgcaatacggtgctggcgccgaccagcgagaatgtggacggcgtgctcacggagctggaagggtatatggaagcaaatgtggacgccggcgtggcggagcaggaatctgtatacaataattcgcgggcagtcagcggcgtcacatttgtacttgtgctggtgttctttgtcgttgcggtgatcggatcggtacgcactgttgtaaatccggtcaagagtgtgacgacacagctgaatgatattttaaaagagatcgagtccggcaacggagatctgacacgcagaatctctttgaagaacaaggatgagatcggacagcttgccggcggcatcaacgtgttcttagagaccctgcagcagattatgagccgtattgtgattgactccagggagatgggcgagatcgtatcgcgcgtttcgggcagtgtcggcacagcaaactccaatgcctgcgatatttctgccgtgatggaggaactctcggctaccatgcaggaagtggcgtctgccgtcaacacggtcaataccaatgtggcgcagatcgggcaggatgtgaatgagattacaaaagaatcacaggatatgaactcctatgcgaccgagatgcagagccgcgcggaggatatgaaggagaaagcggttgccaacaaggagacgaccagccggatgattacggatatcatcgagactttaaaggctgccattgaggagagcaagagtgtggatcgcgtcaacgagctgacggaggagatcttaagcgtatccagccagacgaacctccttgcactgaatgcttccattgaggcggcgagagcaggcgaagccggaaaaggatttgcagttgtcgcggatgagatacgaaagctggcggattccaccagagagaccgcgaacaatattcagtccatcaacgcgctggtaacgcaggcagtgaataagctcgccaacaattccaacgcgatcgtcgaatacatcgacgggacgatcatgccggattatgaccgatttgtagaaaacggtgtacagtaccgggatgatgcggcgtatgtgaataccacgatggatcattttgaggagaaggcgcgcaacctgcagcagatcatggagaagacggtggattccatccgcgacatttccacggcgattgaggagagtgcaaacagtgtcggaaatgcggcgagcagcacgacggttctggtgtccaatatcgacaccgttcattcggagatggagacgaatcagagcatcagcgaccgcttaaagggagaagccggacgatttaaaaatgtataatattttagtacgttagtgcattgacatgaatgtacagtttcttatataatgtgagttaagtatataagagactgtacattttttttgtacatcgcatgttacaagaagaaagagataagaggattatgaagatggaattagtgtatgcaagtacgagagacgcacaggaaagagtaacggcatcgcaggcgattctgcgtggtctggcaaatgacggaggactgtttgtaccgacacagattccggcgctggatgtgccgatggaagagcttggcaaaatgtcctatcaggagacagcatatgaagtgatgaagcgttttctgacggattttaccgaggaggagttaaagcactgtatcaattccgcgtatgacagcaagttcgacacagaggagatcgcaccgcttgtggaggcggacggcgcatattacctggaactgttccatggttccacgatcgcttttaaggatatggcactgtccattctgccgtatctgctgacgaccgctgcgaagaagaatcatgtaaagaatgagatcgtgattctgactgccacctcgggagataccggaaaggcagcgctggcaggattttccgatgttccgggaacgaaaatcattgtattctatccgaagaacggtgtaagcccgatccaggagaagcagatggtgacccagaaaggtgacaatacgtttgttgtcggcattcacgggaactttgaccaggcgcagactggcgtgaagaagatgttctcggatgcggcgctggcaaaagagatggacgctgccggatatcagttttcctccgcgaattccatcaatatcggaagactggtaccgcagattgtatattatgtctacgcctacgcgaagctctatgcgaatggcgtgatcgcaaaggatgagccggtgaatgtcgttgttcctaccggcaacttcggcaatattctggctgcattttatgcgaaaaatatgggaataccgattgccaagctgatttgtgcgtccaacgagaacaaagttttatatgatttcttctccacaggcacatatgacaagaaccgtgaatttatgctgacaagctcaccgtcgatggacattctgatttccagcaatctggagcgtctgatctatcgcattgcgggaaatgacgccgagaagaatgccgcgctgatgagagagctgacgaccaccggaaaatacgagatcacgccggagatgagagcacagcttaaggatttctatggcaattacacaagcgaggcggagacggcagaggtcatccgtacactttatgagaagaccggctacgtgatcgatacacatacagcggttgctgccggtgtatatggaaaatacaaaaaggataccggcgatgtagacaccaagaccgtgattgcgtccacggcaagcccgtttaagtttacaagaagtgtgatggatgccattgaccacaagtacgacagcatgtccgattttgaactggtggatgagctgagccggattgcgaacgtagccgttccgcaggcgattgaggagatccgcaatgcgaaggtgcttcatgataccgtgtgtgaagtggatgagatgccgcaggtagtaaagaatttcctgaaaatctaagaataaaaatgtgaaagacataaaaaagctgcacgccccgcgcgtgcagctttttttgataaatcttttttgataaactatttttcggaacagatttcaaagatgaagtgaagcgttccaaacgggaataaaaccggcagaagataagtctcatgctcaaaggtaagcagatctttttcttctacaaccggagcctccagtgacagattcatggagaactcgtttgacatattgacacagaacagaccgttgtgcagattgataaaatcttctacagaagaacgcacatactcatcaaattctgtaaagttttcgttgacgtacttggatgcaaaagcaatacatgtattctctggaatatcgagataagtccggatggaaaacgatccgcttactttctgtgatacgcagtagttggtcgggtattccttgcaactgctcggagaaaccagtgtgaaatcatctccgataaaccgatagagattattgaacaaaagctggaaaaaagagatttcatacttggagagcggacgttcagcgagaatgaaaaagttctcgatcatatggcggatggcattctgatcttcctcggagtaactgtaatcgtccagttcgttctctgactgataatcaatgatcaactcctgtagctgctgattattgatgagtccctcgtccacaagtgcctgtccgagaagaagaaaatccggcttctgctctgcgagaagcttagtcacttcctcttctgtgagatatccctcatgaatggcgagttcaccaaaacgcttgtcctcgtgtgtctgaagaatgacgatacggtctacctcgtttgcggtcatatatccggcatgaatggcaagagtgccaagtttgatcttggttgaggacttccgatgcatggtctctaacagctgctccctggtaacgacaccgtgtgataataagtaatttccgaaaaactgagcgtacatagcttatctcccttcaaatcttgaagaaataatgtgatgaatctgttctgcattcagcggcttctggataaaatcgttagccccggcttcaatggcagcttttaactgtgtctgagtaccgacggatgaaacgacaataatatcagcatccttatcatatgccttgatctcggtaatggcagaaatgccgtcctttacaggcatgacaatatcaaggaaaaccaattcaggtgactcttttttgtagaggtcgatggcgtcctgtccattggaagcttccagaaacaccggagtaccatatgtggaaacaatatcctttaactgctttctggcaagtatggagtcgtcgccaatgagaatcttaatgccatttaacatcataatgcatctcctctgtcatcataattatattcgcttctattttacactaacaagaaaaatagttcaatgaatatattgaattttgtaagaagaagatagataatgtaaaataaatatgtcgaatcagtcggctggaatgagaggataaaagaatggatgtaatgctgatatttgatgtggtcatcgccattttcggggtatatatgatcggagcagcacttaagatgaaaaagacagggaagatcagctcggcggtcatcacggcggaggagatcgccagatgcagaaaaacgaaggagttcatagcgtttatttactggaaagaggcagtgttcggcgcattgattatcgctgtgggtgtccttggaattatcaatgataaagtggtatcgctcggagcgttcaacgtggttgaacttttaatcttcctggcggcatttctgtggttccagtcccagctgcgcaaggcaagggaacagtttttataaaagattctccgaatcatcagatggcattcacaggaacgtcacattgcgacgatatgatgtcaaaaacagggaggtatctgcgttatgagaagaatactggtagtagatgacgaagaaaaaatcagggcgattataagaaaatacggagagttcgaggggtacgacattaccgaggcaaaagacggcatggaggcggtaaagctctgcagagagcaggattttgacgtgattattctcgatattatgatgccggagctggacggcttttcaacctgccgggagatccgcaagaccaaaaacattccggtgatcatgctgtcggcacgcggagaagagtatgataagattcacggatttgaacttggaattgacgattatgtggtgaagccgttttctccgaaggagcttatgatgcgtgtaaaagtggtcattgaccgcaacggcggaagagattctgcaagcacgaacgggcatgagattttccaggcggaggggcttgtcattgattttaccggaaggactgtgacggtggatggaaagcgcgccgaactttctccgaaagaatacgacttgctgttttatctggtgcggaaccggaatattgcactggagcgtgaaaagctgattaccgaggtgtggggatatgattattacggggacgaccgtacgctggatacccatatcaagctgctgcgcagcagccttggggactaccgcaagttccttgtcacgttaagaggggtggggtaccggtttgaagcatgaaaaaatcagtatcaaatggaaaatctttttctatcttctggtgtttaccggaatccttttgacggtgctgtggcttgtgcagatctgttatctggacaggttctataagaagatcaagtcccaggaggcactggaactcacctcggaagtgattgaggtcttacagagcgattcccagaacattgaagaacagatcgatgcgctggcggcgcagaataacatgatcgtgtttgtcacggatacggacggaaacaccatttacagcgcagaatatattccaaattccaggctgtgcgagatgccgcaggagatgatacagaagctgtacgaagctgccaaaagcaagggcggtagcacgaagctggaatttgagggagatgtcgggaagaatgattttcagaatccgcaggacgtgatgaatcccgatgcggcagctgatgcggagggagccggaaatatcccggatgcagccgatgtgacaggagcgggagcagaaaatgccccggatgtagccgacggcgcagagcaggagactgcggggatgccggcggagaacggttttatgcagaaccacggacaggaacggattgagagcgtcatttacgtgaacgtcgtctcgatcgatggaaatgagagaatcctgtttgtgaacgcgcagctgacgccggtggatgcgacggtcaatacactgcgtgccgaactggtatggatcacagtcatcatgattgttctctcgctcggtattgcacttttgatttcaagaaaagtgtcacgttccctgatcggtctgaatgcctccgcgaaggagatggcaggcggcaattttgacgttcattttgacggaaccgattaccgggaggtcgcggaactttccgataccctgaatatgactgcgcgggaacttggaaagagcgagcgcctgcggcgggaattgatcgccaatgtatcgcatgacctgcggacaccgctcacgatgatcattgcctacgcagaggtcatgagggatctgccgggggaaaattctccggaaaatgtgcaggtggtcattgacgaggcggagcggctgaccaatctcgtcaatgatatgttagacatctccaagcttcaggcaggcgtactggaaaaaaatgtcacggtctacaacctgaccgagagtattcagtctgtatttgcacggtataataagttaaaagagcaggatggttataagatcgatttctcctacgaccagatggtcatggtggaggcggacgagtacaaaatcttccaggtcatctacaatctggtcaataacgcaatcaattacaccggggatgacaaacagatctgggtgcgtcagattgtgcgggaagacggatatgtgcggatcgaagtgacggacagtggcgagggaatcgctccggaggcgcttccgtatgtgtgggaccgctactataaagtggacaagacacacaagcgggcggtcatgggaaccggactcggactttcgatcgtaaaaaatattctggaactgcacgatgcacgctacggagtagagagtgaagtgggaaaaggttctaccttctggtttgaactgaaagtatatcagattgtttaaaagagctgcccgcggattgacggagcgggcagaatggaatactctggaaaatacgcgtgatgagagaactccgtctgtaatggacggggttcttctttggaggaaaatgcgagtgtttctttcatgccgcgtttgacatcttattctgtgtctttgccacgtttgaacactccgccgactgtgtccgacacgccgcagacaatgagcgccacacgaaagctctaaaattgtctgtggcgtgcgggctcatccggcggagtgctccaaacttggaaaggcacggatcatcagggatgtcaaacgcggtgtgattagaaacaccggattttacggtcagaagaaccgccggccattatagacggagttctaagttcgcatattgccacatgcttcgtcctgcccgctctgtcaatccgcgggcagcttttttagaacaaggcgtgcagtgaaaatcagacacgctcatccatcgggacataaatcttatgctcgccgacgtttttgtaggcaggacgcatgatcttgccgccgcctgcaacttcctccagacggtgcgcactccatccggcgattcgcgcgatggcgaaaatcggcgtgtagagttcgaccggaagtccgagcatgctgtaggcgaatccgctgaagaagtcgacattcgggctgacacctttatagatcttgcgctcggcggcaatgatctgcggggcaagacgttccactgccgtgtagagtgcgaattctttttcatagcccttttctgcggagagacgctttacgaatccgcggaagatctgtgcacgcggatcggacagcgaatagaccgcgtgtcccataccgtagatcagaccggcgtgatcgaacgcttccttgtggagcagggcagtcaggtaacggctgatctcctcctcatccgtccagtccttgagattggctttcatatcgtcgaacatgcgcaccaccttgatgttggcaccgccgtgcttgggacctttgagggaacctaacgatgccgcaataacggagtatgtatcggttccggaggaagataccaggtgggtggtaaaggtggagttgttaccgccgccgtgttccatgtgaagaatcagggcaatatccaaaagctttgcttcaagcagcgagaacttgctgtccggtcttaaaatgtgcagaatattttcggcggtggaatattcttccttcggggaatgaataaacaggctcgcgccgtcatgataatgcttgtatgcctgataaccgtacacggataaaagcgggaaaagactgattaactgcagacattgtctgagaacattgggaagcgaaacatcatccgccatctcatcgtaagaatataaggtaaggacactgcgcgcaagcgtattcatcatgtccttgctgggcgccttcataataatgtcacgcacaaagctggtcggcagcgtccggtaactgctcagcagagccgaaaaatcgcgcagctcatgcttcttgggaagcttgccgaaaagcagcagataggtacattcctcaaagccgaagtggctgtcctcgggaagtccggcaatcagatctttgacattgtaaccacgatagaagagctcgccgtctgcgggaacagattcaccattgacaatttttgtggaactgacttccgagatctccgtcagtccgaccaggacaccttttccgttcagatcgcgcagaccgcgtttgacatcgtatcttgtgtataattccgggtctatttttgaacattcggcagactttgcggccagccgacgcagttcgggtgtaatttcacagaattgattcattgttagccctccttaatgttttcgtcttttcatcatagcatatgtacttatttttatacaagaaaattgaattatatttaatgaaaattttaaaatttaaaagaaaactggtaccttaaaaagggaaagtaccaaaaaatgctttcttttttcagaagagtctattacaataaaaaaggatcatcagatgtaaaaagggaggatacaggatggatctgaatatagagttgctggcaaaaaaggcaatcgaggcaaaggaacatgcgtatgtaccatattcccatttcagggtaggtgcggcgcttcttactgcagatggtaagatttatacgggatgcaacatcgaaaatgccgcgtacacaccgacgaactgtgcggagcggacggcgtttttcaaggcggtatccgaaggggagcgtgattttacggcaatcgccatcagcggtgacgcggacgattatctgtatccgtgcggcgtgtgcagacaggtaatgtcggagttctgcaaggcggatacgtttcagatcatcctggtaaaggaggacggaacatataagatttttaccttggaggagcttctgccgggcgcttttactgagacagagctgaaaaaaggacagcggatgtagggcgtccgcaacagaggaaggagagcgttatgagatattcgattgagggagaaccgcttccagttgtaatctgcaatctggagcagggagaggtaatgattacggagagtggtgccatgtcgtggatgtccccgaatatgaaaatggagacgactggtggcggcatcggcaagatgtttggaagagcgctttcgggggaaagtattttcttaaaccgctacacggcaatgaacgggaatgggatgatcgcgtttgcatcgtcgttcccgggatcaatccgggcgtttgatattgtaccgggacaggatttgatcgtgcagaaatcggcatttcttgctgctgtatccagcgtggatctgtccgtgttctttcagcagagaatcgggagcggacttttcggaggagagggatttattatgcagaagctttccggaagtggaaccgcatttctggaatttgatggttatattaaagaatatgaacttgcacccggacagcagattgttgtggacacgggataccttgcagccatgacaggctcctgcaagatcgaagtgaagacggtgccgggagtgaagaatatgctcttcggcggcgagggtatttttaataccgtgattacgggaccgggaagagtgtggctgcagagcatgccgattgcacagatggcaaatacgctgcgtccgtatttcccgagcaataatcattaaagatgcgcggcgcattttacattcagaaaaaaatagaaatgcgcacagaaattggcactaatttttggttgcagatcggggcatattaaagtataataaaaccagtaagaaacagcctgggatgtgcgacaccctacatttttgaacctacatttacttttatgggattcttatatttggaggcagatgtcaagccaccagtaccgcaaggtacgcgagcagtggaagacagaaactgacatgcggttacccacctagcggcagctaggagtcaaaaacgtaggaaacggcattttgggtgatacaaaagattctgagggatacaacagaagcttacagtacgagagagaacctgtcaggatacgaaggatgacggatacgaaagatagatcaggtaccaaagagtagaaaagatacggaagaaagaagctgcctttgtgtgaggcagcttctgtttttttactcttttgcagagaattctggggaaaggcataaagcgtgatgggaagtatgaaatgggaaagagaacaaaaaaaagtggcgtaaaggcgcacatcggcatcgcttgtctgatgcttttgcttgtggcgggtgcgcttgcgtctggatatcgggacagacagttaagggagcaggaaacattgcccgaagagtgggtggaacttgcggaaataaaagaggaactctcctttggagtatacgggaaggaagattggaaagccttttttgagacatttcccgaagacaggctgaccggggaagtacttggggaactgctcgcaaagctgcaactgtccgattacatagagctccccgtcatgagggaacagcagaaagtatcccgggaagactggaattacgtctacggtcagattctggacctgcttgatatggaacatgtcgtgacgaaaatggagtttctggttgtggatgtcatggaggcggagaaccagaatgtgattataacaaataagggagaattttgcacggtgcttccggccagctattttaagcagtggaatggatatgaaggttactgcgtggaaaaccggtgcatcggagtcgttggaacgctgaagaaggaatttacgctggacaatgcataccttacggactgttccgaggacggcgtggattttctgtatgcgggcgcggcataccacaaggatgcggtatccttagcggaggatgtcgccccctgtgtctgtgatattgtgctggcggacggggaacttacggcactgcgtgtaaagcaggagaccatcgagggagaactgttgtcctatgacgatgagaccatcgagatcaaaggatacgggaagctttgccataccggaaaactgccagtgtaccagacctatggggaagtgtcggaaaaatccatttccgatgtgaccctcggcaatatgaacgtggagtatgtgacgggggagaagcaggtctgcgccattttaatccgcgagccggcagtcatccgcgaaatccgtgtgctgctcctgggggatgacggaacaaaatgccgtcagtccgtctatctgaaatgtacgtcagacgcagcggtcacctggcagggagagacaacacaggtagccgcgcagacgctgattgctgcatccgatcagatgacaggagatacacagggaacatttacggtgacgccggagcaggagggctgcgtggtgatctgtgatgcagatggcgcagagctttctaacggctacgggggcagcatggaagtgcggtgcctgggggacggctatacgctggtcaacagtctgccgctggaacggtatctgcaggacgtcgttccgagtgaaatgccggcatcctatgaaccggaggcattgaaagcacaggcggtctgcgcgcgcagctatgcctgtatccagctgcttcggggcgatctggcggaatacggcgcacatattgatgacagcaccgcgtatcaggtatacaaccgggtgacggacgcggacgcagccagggaggcggtaatcgccacacagggggaagtgctgtcctatcagggaaacatcgtggaggcgtattatttttccacgtcgatgggatacaccgccgcagctgatgtgtggaatgtggaagatccggcggaatacggctatctgacaccggcgtgtctccttacggatggaaagatgcaggatctctccggggaggaggcgtttcttgcttatattcagagtcccgcagatggatacgacagtgactgccggtatttccgctggagagcggaggcggattaccacgggaaaacagatgaagtgaattccatactgctggaacggtggaagagttcaccaaagaatataaacttttatccgaccggtcagactacggaaatacagaatcctgatgcagcatcggtggaggcactgggggaagtgaccggcatgagcgcggcggagcgcggcagctccggtgcactgcttgccgtaaagatcacgtatgagaagggaagcgcccttgtgcggacggagtataatatccgaaaagttctgggtgcctgcgccggaaatctggtgtgcgcagacggaacagaacagacggatgtgacgatgctgccgagtgcgttttttgccataacgaaacagggggacggcggcatggttttatatggaggcggctacgggcatggactcggcatgagccagaacgcggcgaacggaatggcgaaggccggaatgaattacgaagagatcttgcaatatttttataatgacgttaaactggaaaccatgaaataatgaatcctgacggattcgctttttgaaggggagcaatatgatctggaagcttattggtaatgtcaaatcctttcttgataaatgcaagcgagacaagatcaatgcctattcggcgcagtcggcgttttttattatcttatccatcattccgtttctgatggtgttctcgtctctgctgcaatatacatcggtgacagagtccatgctgcttgagatcatccgtcatctgatgccggagtatgtctctccgtttctgatatcgctcgtggatgaggtgtacagcagatccatgggaattatctcaatcacggcgatcatcgcgatctggtcagcggccaagggcgtccagtacatgacggacggactgaactcggtcaatgatctggaggagacgaggaactggtttgtgctcagattctgggcggtcgtctatacggtggtttttctggtggcgattgtttttaccctgctggttctggtgttcggaaaccagttaaaggtacttgccacacagtacgttccgattttagagcatgcctcgcgggtgctggcacatttccgcgggcttgtgatgctggcgcttttgatcgcatttttcgatgtaatctttacggcgctgccgaaccggaagctttccttccgcgggcagctgccgggggctgtgatctgcggggtagcgtggtatgtcttttccttcggactgtctgtctacgtggactattttaacggtttttccatgtacggcagcctgacgactattgccttgattatgctgtggctttacttctgcatgtacatcatgatgatgtccgccgaggtaaatgtggtgttcaacgcttacttccgcaaatggtggaagcgctttaaaaccagcaggaataaaaaagcttgatgttttgcgcctgctgtgctaaaatgctatacagaattcagaaaaatcaaaggctgtgaatgtgtacggaagcgattccgggtatcgtaagatatcagtagagtgcaggagactctttcagagagagcgggtcatcggctggaagcccgtttaggataagacctggacttgaagttcgcacaggagctgcatctgtgaagtgaaagtagtggatgacgtcggatacacgttacgtatgaattgagagcttttctttggtgatatgaagagaagaaacagggtggtaccgcggaatcattcgtccctagagcagggatggatggttccttttttgatgtctgaaatagtttaaaggagaattagaaatgaaagaaaaattgcagcagatcagagaaaaagcaatagcagagattgaagggtctgatggattagaccgcctgaatgaagtccgccaggcagtgcttggaaaaaagggtgaacttactgcggtgttaaagggaatgaaagacgtagcgccggaagaccgcccgaaggtcggacagtgggtcaacgacacccgcaccgccattgagacgatcatggaagagaagatgaaaaaactggaggctgaggcgctccggaagagatatgaggcggagaagatcgacgtcacaatgccggcagtaaaacacgaaaagggcaatctgcatccggtcacacaggtgcgcaaccagctcattgacatttttgcatccatgggatttgaagtgtacgagggaaccgagattgagaccgactactataacttcacggcgttaaacacaccgcaggatcatccggcgagagatatgcaggatacattttacctgtcaccggaatttttactccgcacccagacgtctgccggacagattcatgtgatggaggcgaagaaaccgccgatcaagatcatctccccgggcaaggtgttccgttccgatgacgacgcgacacattctccgatgttcacccagatggagggtcttgtggtagacaagggaatcaccctctgcgatttaaagggaatgttagatgagcttgtgaagaagattttcggaaaagagacgacaacgcgtctacgcccgtcctacttcccgttcacggagccgtccgtcgaggtggatgtaagctgcttccagtgcggcggatgcggctgcaaactctgcaagggaaccggctggatcgaagtgctcggagccggcgtcgtcaacaataaagttctggaaggatgcggcattgatacgaatgagtacagcggttttgcgttcggtatcggtattgagcgaattgccatgttaaaatacggcattaacaatatcaagctgctgtttgagtcagatcttcgcgtattaaagcagattgacgattaaagacgaatagaaaaggagagttatcatgttagcaccattaagctggttaaaagattatgtagatattgatgttaccccgaaggaactggaggaaaagttgttttcctgcggctttgaggtggaggagctgattgaagtcggaaaagacatcagcaatgttgtggtcggactggtggaatcctgcgagccgatcccggatacccatttaagtctctgccaggtgaatgccggagagcacggcaccttccagatctgctgcggggcagacaatgtccgtgcaggaggaaaatatccgctggcgcttgtgggcgcaacagtctatgcgaccgcaaaggatcatgtgacgatcgagggcgtcatgacgatcaagaagggaaagcttcgcggctatgaatcctacggtatgctgtgttccggaacagaactcggattgaacgaagatttatatccgggggcaggatacaacggtcttttagttcttccggaagatgcgaaagccggagcagacgtaaagccgatccttggaatggatgactggatttttgatattgcgatcaccgcaaaccgcccggactgtcagagcatttacggaattgccagggaagtggctgcagtgctcggaaaagagtgcagggagccggcgttggattacacggagacggcggttaaaaaagactttaaggtggaagtatccgcaaaagatctctgcccgcgctatatcgcgcactatgtccatgacgtgacgattggggagtccccggcgtggatgcgcagaagactggcgttagtcggaatcaactcgatttccaacatggtcgacatcacaaactacgtgttaaaagagctcggacagccgatgcatgcatttgactatgcttatctggagggcgatcagatcaatgtcagacgtgcaaacgagggcgagcgcattgtgacgctggatgaaaaagaatttacgctcaattcttccaatcttgtcatctgcgacggcgtaaagccggttgcactggctggtatcatgggcggtctgaactccgagatcaaggacacgacaacggaagtcatgtttgagtccgcaaagttcgcgcgcgacaatatccggaagagttcaagagcgctcggacagtcctccgattccagtgcgatgtacgcaaagggcgtctatgagtacacgacggtcatggcgatgaagcgtgccctgcatcttgtggaagaactgggatgcggaaaagtgtcgtccacacagcttgaagtctccaccggcaattctatcgagccgaaagagatgaaggtcagcgtaaagcgtgtcaacggtgtgctcggcattgaggttccggaggaggacatgctgcgcattttatcggcgcttcagttcgcaccgtccatcgacggggatgaacttaccctgcagattccggcataccgcgaggatatggattcctacccggatgtggcggaggaagtgatccgcatgtacggttatgagcatgtgattccgacctttatgccgacggcaaaagtgaccttgggaggtcttaacttaaagcagaagacggagcttaagatcaagcgggcactctgcgcagcgggcgcttacgagggagtccattactcattcttctccccgtccgatctggatctgttaagactgccggaagacgcgccggagagaaaggcgatcaagctgatcaatccgatcaacgtggatttatccctgatgagaaccacgctggcatccgagatgctgtacgcgatttccagaaaccagaagaagggaattctggagggacgcatttttgagcttggaaatgtctttattccaaaggcactgccgctcacggaatacccggatgagagagagaccctctgtgcgggcgttttcggagagaatgaatctttctatacactcaaaggtctggcagagacggttgcggatgcattaaacgtaagctttacctatgaggcggcggagagaacctttttgcacccgtaccagacggcggagatcttctgtgagggagagcgcgtcggttatctcggaaagctttcctatgagattcaggacgaacttgacatgcgtgtgcctgcttatgtgatggagatcgacctcgccgcactaaagaaatggtacggcaaggagcagattttcactccgcttccgaagtttgcggaggaaaagcgcgattttgcgtttgtggtagataaaaatatcacctgcgcacagattgagaacggcatccgggaagcctgcaaatacgtgacagatgtgaatctgttcgatgtgtatgaaggcatccagcttggaccggacaaaaagagcatggcattctctgttgtatttaccccgcaggaggaagagctcacgggcgagatggtagaaggatttgtgaagaagattttgaaacatctcgaagcaacactggatatcagacttcgtgcgtaagaggagtagttatggacgtaaaagatttttattatgaccttccgcaggaactgatcgcacaggatccgctggaggaccgctcaagctccagactgatggtgcttgacaaggcaaccggagaggtggaacaccgccattttaaggatattgtggactatctaagaccgggtgactgccttgtcatcaacaatacaaaagtaattcctgccagactgtatggcgtgaaggaaggcactgaggcaaagatcgagattcttctgctcaagagaaaagaaaacgatgtctgggagaccctggtcaaaccgggaaaaaaatgcaagatcggaaccagaatcaatttcggcgagggacttctgaccggcgaggtcattgacattgtggaggagggcaaccgcctgatccagttccattacgaagggatttttgaggagattctggatcagctcggacagatgccgctgccgccgtacatcacacaccagctgaaggacaagaaccgctaccagacggtgtatgcaaagtatgacggttccgcggcggcaccgacggcgggactgcattttacaccggagcttttagagcaggtgcgcgccatgggcgtggagatcgcggaggtgacgcttcatgtgggacttggcaccttccgtccggtcaaggagagcgatgtgttaaagcatcacatgcattccgagttctaccggatcgagcagtcagaagcagacaagatcaaccgggcaaaacaggcgggacaccgtatcatcgccgtgggaacgacgagcaccagaaccctggagtctgccgcagatgaacacggcatgcttcatgagacgagtgggtggacggagatttttatctacccgggctatcagttcaaggtgatcgatgctttgattacgaatttccatctgccagagtcgacgctggtgatgttagtgtctgcgcttgcaggaagggaacatgtgctgcatgcatatgagattgcagtacaggagcgttaccggtttttcagctttggtgatgcgatgtttattaccgcaaaataggaggagttggtcccatgctggaaaagagaaaacataagcgccttaagatggaacacgcgctggaactggcgcggttaaatgcggacggcacggccgacggcggcgttgtgaatgcggatatcctgaatatctcgcgcggcggagtcggatttttgtcccgcaagagactcgaggtcggcagttattatgacaccaggatcagcctgttcagccgggagatgattgacgctgtgctggaaatcgtacatgtggaagagcaggaaaagggttattactacggtggagaatttatcggcatatcggattcgaatgcggtaaagattgatatttaccaggtctttcacgacatctgaccgtgaaaatagacaaaaaggcacggatgattgtgtgcattatatacgaaatgacaatgaaatggtgcgacactattgacaatagtggtcattaaatttataattggggacagttaaaggatagttcacaccgcaaggtgcactaaaccggaaagctgaatacaggctatttaggcatgtatgaagttttccggttttcttttttccaagaggagtctgttgtttgaaagaggagggagtcagatgagaatctatcgggcaaaagattattatgacatgagcagaaaggcagccaacatcatatccgcgcaggtaattatgaagccggactgtgtgctgggacttgcaaccggttcgacgccgatcggcacttatgcacagcttgtggagtggtacaaaaagggggatctggatttttcagaggtaaagacggtaaatctggatgaatataaagggctcgaccagtcgaacgaccagagttatttttacttcatggcggaacatctgtttgacaaggtcaatattgattttcagaatgtcaatatcccaaatggaatggaaacggatgcggacaaggaatgtgcgcgctatgaggcgaagataaaagcgctcggcggagtggatctgcagctgctcggaatcggtcacaacggtcacatcggattcaacgagccgaacggacagttcgaccgcacgacgcactgtgtgaatctgacacagagcacgattgaggccaacaaacggttctttgcatcggaggaggatgtgccgcggcaggcgtacacgatgggaatcaagacgatcatgcaggcgaacaagattctgatggtggcaagcggggaagacaaggcggagattgtaaaacgtgcctttttcggaccgatcacaccggaggtgcctgcatcggtactgcagcttcacaacgatgtgacactggtgggagatgaggcggcgctgtcgctgatcggctcctgtcagagttaggatatgggaatgaaatcatgaagataagtaaagtgattaataacaacgtcctgtcggcatttgatgaaaacgggcaggaagtcgttctcatgggaagaggactcgggtttaaggcgaagacaggagacgacattgacgagagccgggtacagaaagtgttctgcatcgaaaattcggcgctctcaaggcagtttcaggaaatgatctccaacatccctatggagcatatgcagatctcggcggacattatctcctacgccaagaacgagtgcggcatggagttaaaccagagtatttacgttgcgctgacggatcacatcaatttcgcgattgagcgataccggaagggtattgcgctgacgaacgctattctgtgggagatacggcagttctaccgcagggagtatcttgtcggagagtatgcgctccgcctttttgcggagagactggatattcattttcaggaggatgaggcgggatttattgcactgcattttgtgaatgccgaatataatacggatatacatgacacttacatgatcacagatgtgattcagaagggaatcgagattgtaaaggcagagtatcagaaagcgctggatgaaaaatccatgcactacgaacggtttgtggcgcatctgaaatttttcgcgagaagaattttcttcagcaaggagatgctctccgatgaggagcaggagttctccgatctgattgaactgaaatatccgagggaatatgcgtgtgccagaaaaattgccgattacatcgaagcgcagtatgactgcacggtgaccaaggaagagatcatgtacctggcaattcatatccggagaattacgacagacagcgatgaatgagaaaggagagaggctgatgtttggactatttcataaaaaagaacagaaagcgctggaactgggagcaccggtaagcgggcaggcagtaccgcttcaggaggtgagcgatcccacgttcggcggggagatccttggaaaaggcgtggcggtaagacccacggatggcaggatttacgcgccggcggatggggagattaccttgttgtttgatacactgcatgcgctcagcatgacgacggataccggcgcagaactgctgctccatatcggacttgacaccgttgcattaaagggtgcgcattttaaggcgcatgtaaagacgggggataaggtcagaaaaggtgatctgctgctggaggcggatcttaaggcaatacgggaagccggatatgatgtgattacaccgatgattgtctgcaatacagactgttttgcagaagtaaaagcggtgacgggtgcggaggtgacgccgcaggatacggttctgattctcacatcgaagtaatctgttattcaatggtattttagccggaactttccggtataaaataaaggggcaaatcatatatggcatagggagaaggtctactgtgccagaaaaagaaggaggaagaagttatgatgaaatatcttcagaagttgggaaaagcattgatgcttccggttgcctgcctgccgatctgcggtatcttaatgggaatcggatatgcactctgcccggcaaccatgcagggtggtgacattgcaggtgcaaaggcgctgattggatttttccttgtaaaagcggggggcgctttaattgacaatatggcatggctgtttgtcatcggcgtcggcgttggtatggcagacgacaatgacggtaccgcggcacttgcggcgctggcatcctggctgatgattaccaatctgctctcgacgggcgttgttaccacattgatgccgtcaatcgcagagaatgcggataagacgctggcattcaacaagattgcaaacccgtttatcggtattcttgccggtatcatcggagcaacctgttataacaagttcaagggaacgaagcttccggactggctggcatttttcagcggcaaacgctgtgttgccatcgtatccggtgtggtatcgattgtcgtgtcagctatcctgttattcgtatggccggttgtgttcagcgcactgatcgctcttggtcaggcaattgtgggaatggatgcagtgggagcaggtatctacgcatttttgaaccgtcttttaattccaaccggtctgcatcatgcattgaacaacgtattctggtttgatacgatcggactcggtgatctgtccaacttctgggcgggcaagacatcggcggatgtatcatgggatctcggtatgtatatgtccgggttcttcccgtgtatgatgtttggtattccgggtgcggcacttgccatggttcgcacggcaaagagcaataagaaaaagatcgcaatcggattggttggttccgcagcactttgttcattcatctgtggcgttactgagccgttcgagttcggattcatgttccttgctccggcactctatgtagtatatgcattattatacggtatttttacctttatcacggttctggtaggcttccgcgcaggcttcagcttttctgcaggtgcaaccgacctgatcttttccgcttcccttccggcggcaaagaacacctggatgattcttccgctcggaatcgcagcatttgtcgtattttatgttgtattccgttttatgatcacgaagtttgatttaaagactccgggacgtgaagatgacgatgatgatgcagagaaaggtgcaaagcttgagaataatgattacaccgaagtggcaagaatcgtgcttgaaggtgtcggtggcaaagagaatatagaaagcattgataactgtattacgagactccgtctggagatcagggattacactaaggtagatgagaaaaagatcaaatctgccggtgtggcaggtgtggttcgcccaagccagaaaacagtacaggtcattatcggtacccaggtacagtttgtggctgatgaatttaaaaaactttgtaagtaaccatattctgtaaaatagattgccccaatgaaaaacgaccgcgaaagcggtcgtttttcgatgcagacatatattcagcgctcataaatggtgtagtggtgcttttttagaagtgtgatggcggcggcgagcgattcgctgtcgtacatttccagatgcagcacgccgtcctcaaattcacgattgtggatgatgccgatattcttgatgcttaaatggttgctcgcaagaatggtggcaactgtggcaattccgcccgcttcatccagaagatccatgtacagttcatatacctgttttaaggtgccgttcgcgtgaagggtcagtgaatcccggtagtcttttgccgaggtaaaggcctccatcagcgctttgctgtcggaagcggcgatggcagagcgcatatgaccaagctcctcacagaaagagtcaatcagtcttagaatctgttcctgattggaaagacagatattttcccacatgacgggggaggaggaggcaatgcgtgtaatgtccttaaagccgccggcggcgatggttttcatggttccttcacagtcatcgcagcttttcacaaggttgacaaggctgtaggcgatgatgtggggcagatggctgatggcggcagtggcataatcgtgctgctcgtagtcaagcaccatcggtatcgcaccgagagaagccacaagctccttaaagtcctctaacgcagcgggatcggtctgggcggtcggggtgagaatatagtaagcattttccaataaaaattccctggcattggcaagaccggtcttctcggagcctgccatcggatgtccgccgataaactgcgcctccatgccgagggcggtcacttcccggtgaatgtcggtcttgacgctgcccacatcggtaatgatgcagcggtcgcagacgtgtccctttaaaagacgcagatattccatgtttttctggacaggcgtgcacagaaaaatatagtcgcagtcatagaaatccgacagttcacaggggctggcgttgtcggtcagtccctctttgtaagcggcctctatcgtcgcggcatgaccggctgtagcgataatgaccagatctttatgtagaatacgaaggcgcttggcaatcgaaccgccgatcagtccaagcccgataaatccgattttctgaagtttcataaatgaatcccccacaagttattggtacccaattatcatagacatttccgcctggaaagtcaacacgttaatctgtgagagtacggaaagatgcggcgtgtatggcgagaacatgtccaaattgtaaatattgtgtaaataataaaaagaagtattccaaaaatgttcaaaagtaatacatattattgctaaatgtttctgatattataaatacagttagtaatattgaataaataagttgtaaaaaaagacggaatttagtaaaatatatccatacataaaacaattacagaatatggagggtttgctatgaatgtttacacaactgacagaattcgtaatgtggttttacttggtcatgggggatgtggtaagacgagtcttgtggaagcaatggcttatctggcaggcatgacatcacgtatgggaaaggttgaggacggaaataccatcagtgattatgacaaggaggagatgaagcggcatttctccgtcaatacttcggttgttccgattatctgggaagataccaagatcaacatactggatacaccggggtattttgattttgtgggtgagaccgaggaggcggtaagtgcggctgacgcggcgatcatcgtggtttccggcaaggcgggaatcgaggtcggcacgcgcaaggcgtgggaattatgtgagcagtataagcttccgcgcatggtttttgtgacggatatggatatcgatgaggcgagttaccgtcaggtggtacaggatctgcaggaactttacgggaaaaagatcgcaccgttccatctgccgatccgtgagaacggacagttcgtcggctacgtcaacgtgctgcagcagcgggcgaagcgctggaaggagaacggcgaggttgagaagacggacgttccggattattcaaaggagaatcttggcatctgcagagaggctctgatggaggcggttgcagagacgagcgaggagttcatggaccgctattttggcggtgaggaattctctgaggatgagatccgacaggcactgcgtgtgaatgtggcggagggaagcatcgttccggtgcttatgggttccaatattttggcacgcggcatctacacgctgctggtggacattgtgaaatatctgccaagcccggaaaagcgcacctgcaccggcatcaatgccaagaccaatgaggtttacaatgcggattacgatttcgcaaaggcaaaatccgcctatatctggaaaacaatcgcagatccttttattggaaaatattcccttattaaagtcaattccggcgtgttaaagacggacgacatcttattcaatcagcataaggatgtggaggaaaaagtaggaaagctctacgtgatgcggggcaacaagccggaggaggtaaaggagctgcacgcgggcgacattggtgccctggcaaagctttccggtgcgacgacgaccgattctctctccacaaaggcgaatccgattctgtatattagaacaaccatctccacaccctatacctgcaagcgctacaaggcgaagaacaagggtgatgaggataagatctcgcaggcattgcagaagctgatgctggaggatctgacattaaaagttgtcaatgacagcgagaacggacagacgcttttatacggcatgggcgatcagcatctggaggttgcggcgagcaagctcttcgagcgctacaaagttgagatcgaattaaaacgtccgaaagtggcgttccgcgagaccatccgcaagaaagtcgatgtggagtacaaatacaaaaagcagtccggcggacatggacagtacggtcacgtaaagatgacatttgaaccttccggagatctggaacagccgtatgtgtttgaacagtgtgttgtcggcggcgcggtgccgaagaattacttcccggcagtcgaaaagggcgtacaggaagcggtattaaaaggacctgtggcagcgtatccggttgtcggagtgaaggcggttctctacgacggcagcttccatccggtagattcctccgagatggcattcaaggtagcggcgatgcaggcatttaaaaaaggttttatggacgcatccccgatcctgttggagccgattgcctccctcaaggtggttgtgccggataagtacaccggcgatattatgggagacttaaacaagagacgcggccgcgtgctcggcatgaatccgacggagcacggttatcaggagatcatcgcggacgttccggtgatggaactttacgggtacaacacagacctgcgttccatgacaggcggaagcggaacattttcttatgaatttgcacggtatgagcaggcaccttccgatgtacaggagaaggagatcgaggcaagggcatccaaggtagaacgtgcggaagagtaacagcagtatgtaaaagcagcagaaaagagtaataggcagaaaagaaaggaggatgagcagagatgagaaaagaacttcttgcactggtatcgatgtttgtcctccttttgaatgatccgatggtggcacaggcttacatgatggttccgacggatggcacaggatgggagcagggcgggacggcttcgattgatccgttcctcggcgtgaacgatgacgctgtgcatctggtgtatgagttaaacggcggtgtgaaccacaatgccaacctggatgtgatcgcagtggaagaacttccctttacgcttgagattcctgtccgggacgggtataattttgccggctggtatacggacagctcctacgatcacaagatcacggagatcacggaagaaaatgcagcgaatatggttctgtttgcaaaatggaccagaccgatcgacaaccgctataacgtcgagatgtattcctatcagaccgcgagcgtgttaagccgcaatcaaaaagaattaaaagagtgcaattatgcgtttctggatgatctggatattccgggaatgccgtccaccagagagaaagactatctcgacaatctgatcagcagcgagggacagtgtctgcagggactctgcttcacaccggattacattcttatgacggcgtatgcggatggatccgacacgaaaggctccttaatgatctttgagcgtgagaccggaacctatctggcgacgcttggcatgaaggagaagagccacctcggcggaattgcctttgacggggagaatgtatggatctgccattccaattcaaagacgctggagcggattccatatgaatatattgagagaatcggagccgatgcacccggatactgtgtggacgcatctgcactttccgacgaatacaagctcgacaatattccgtcctgcatcacctgctacggcgggcgaatctgggtggcaacccacaccaaattctttgattccgagatgctttcctacagctacgatgaggaaaatgatacgcttacctcactcagcagctacaatattccgaacaaagtgcagggaattgcctttgacaaaggcggtcaagtatatctgagcacatcttttggacgcaacagttcctcctacctgaaagtatacgcatcgcttctgacgctgacgaagcatcccaatgagccgtcggcaaaggtagagatgccgccatgctcggaggagatcgcaattgcggatgataatgtgtatgtgttatttgaatctgcaagcctgcgttattttgagggaaccgacggcaagggcaacagcagctcgccgattgacaaggtgctggaagtgacggtggcgtcgatctggtaaaaaatagaagaacagcacagaaggagcggttttaagagccgctccttctgtttttcattaggttcatgattttgtcagctttggcagattcttctgcggacatgttctgctttaggatctggaataagagatccgtctccggttcactgaactggatgttatttgattttgcggaattcatggcagagagcagaaacggcatcatctccttgatgtcggtcggctttttggcggtggcaaagttcatgagaaactgtagcttctccggagacatatcggcgagaagcggattgttgttcaaaaaatcgtagggcataggaattcctttctgtttaactgaagatggtttcgtaggtctcaagcatggagaacatattcgcaagcatgtcgatggtttcctgctctttgctggtgcagaaagcgcgcagatcgtttaacatggcaaccatattattgctgccctcatcgacggagcacatggacatcaccttgtcatcctgcgagaacacctggacggtgttttgcagctccatatattttatcaatatggcaaattgctttttttgtgtatctttcatgtaggggagcatggtttttaacatctgcagttcccgtgtctgtgtcatataatcaaacggtgtaaaagtggatgtttcgttatgatccataagaaccctttttcttttagtttatgagcagagaagagactttatgaccggtaacgcatatcatataatgtgggcaaaggcaaaaggaagcatggaataaaagaggcaggacttttgccggagcgcaatcatatacgcgtctgtggaatggagattggtatgcttataatagaaggtaacagtgtatacgagattgatgaggaatgtgtgcgaaaaagaaaagtccctgaaaaatgccagacggcacagaaattgcagatgcagagaaaacgggatgcggagagcggtcttgagaaaaagagcgaacgctagaataataaaaatgaggagcggcaaatgccgctcccttttagaatccgtgtgcgtttttattagcagcagccgaatccgttgccgttgccgtttccgcatccgccgcagcagaagagaagcaggataatccaaaggcagctgtcatttccgcagccattgccggaattaagaccgcagccgttgccaccgcagcagcacagtaataagatgatccagagaatggaaccgcatccgccctcgctacaggaacatccaccaccacagtttgttgcagctaaatcactcatattaaatcctccaaatttttcttacactgtatcttatggcaccccgaaagatttgttacaaatttttctaaaacaattgttatgcgttctctaatttgctatgatgaacgtagaaaaacagagttaaatagcgggagggatgaacatgggatttgttgtaattgcggaaccggatgaagtaaatgcggcgcgcattaagacgatattagacagcctggacaaggatttttcctatgcacttgtcggttcagcggaagcggcgatacagcttgtggagcaaaataccaccgatgtgtttatcgcggatatgcagatgccggtgattaagggaacagaactgttttccatgattgagatgatgtctccggagacaatacggatcgtgatgactgacggcgcacggattgcagatactgtggcatttatgaatgaatgccgtacctttaagattatcatcaagccgtgccgtgtggcagatgacctcatggctccgatccgtgcagcctttcggtataaggaacagctggagcgggctgccggacaggagcaggaacaggagactgcgtacagcatgacggagcaggcgtatctggagcgccgcaggatgtggctgatgcgggcaagcaacaataagagagcgcaggacgtgctggcggaactgatgaaggtgaacctttctttttcagatatggaagcagaacgaaaggaacgcctcggacgctggtatgtctggattgtatccgaatacatcaactgtgtttcgtgcgggactggcgagtttaagaccgcagccgaggggcttgcggcattcggcaataaaccggaacagcaggaatattttgaattgaggtgcactgccgatgaggtggtcgacccggaacggatgaacgaggtcacttatattctgcggattattaccggactgtgtaaggatatcttaaacggctatcggatcatggcaatcctggagccgatggaaaaggtctatgtgcttcgtgtgcgcatacagatgtataaagattcattcagaattaaaaatacaacaatgcgggagggattgtcacgcgcaacggaacttgcgatcgacgcgctcggatacaaatctgtcgtcatgaacaaggagcaggagacgatttttaatctggcattacggcgctgaatgtcataatgtctgccattactataacaaaacattatatctgctataactttttattcattgacaaatagaacaagaaatgtatagtataagaagacggtataattgtatacaattatgcaagcggttatttatgcaatgatcaagaaagattatacgacggagagaagccgtgaaggaaccgccgcattggatgatggcaaaaggagtgcagctatgagagaagtcgtaatgaataagaaaacgaacctgctacagttggaagagcatttttatcagctcgtggatgtggaagagccgaacgtattccacaatctgttcccgtacagtgagataccgaagatcgcattcaatgatcgtattgtcccgcacaacatgccggagaatatctggattaccgacacgacgtttcgggacggtcagcagtcgagagctccttatacaacggagcagattgtaacgatctatgactatctgcataagctgggcggtccgaaaggactggtccgtcagagtgaatttttcctgtatagcaagaaggacagggatgcggtctacaagtgcctggaaagagggtacaagttcccggaggttacgagctggatccgtgcaagcaaacaggatttccagctggtgaaggacatcggactcagagagaccggtattctggtaagctgctcggattatcatattttttataagatgaagatgaccagacgggaggtcatgaatctgtatttgagcgtgatccgcgagtgcctcgagacaggaatcagcccgcgctgccacctggaggacattacgaggtcggatatttacgggtttgtcattccgttctgtgtggagctgatgaagctgatggatgagtacaagatcccgatcaagatccgcgcgtgcgatactatgggatacggcgtgaatttcccgggtgccgtgattccgcggagcgtgccaggtattatttacggactgaccacccatgccggcgttccgtcggagctgatcgagtggcacggtcacaacgatttttacaaggcggtcaataactccacaaccgcatggctttacggcgcaagcggcgtcaactgctccctgttcggtatcggagagcgcaccggaaatacaccgcttgaggcgatggtctttgagtatgcgcagttaaagggaacacttgacggcatggatacaacggtcattacagaactggcagaatactttgaaaaagaactcggctatgtacagccgagccgtacaccgtttgtcggaagcaacttcaatgtgacgagagcgggaattcacgcggacggactgctcaagaacgaggagatttacaacatttttgatacggggaaattcttaaacagaccgcctcttgtatcggtgtccaacacatcgggtcttgccggaattgcacactggatcaattcgtactatcatctgccgaaggagaaatgggtcgataagaattcggatctggttaagaaaataaaagtctgggtggatgcacagtatgaggacggacgtgtgacggtacttacggattccgaacttgtggaagagatcggaaagtgctgcaaagagctgaacatcacgatatagcatgaggtaaatagatgagtgaggataattattcgctgagttcgcgcgtgtttcacacaatacgtgaaaatatactgtccgggaaatatgcgacggacgaggaattaaaagaaaaatccatcggagaggaactgggggtcagccggactccggtcagggaggcactgcgccagctggaactggagggtcttgtgaccatcattccgaacaagggagcatatgtcgtcggaatctcccagaaggatatccgcgatatttatgagatccgctccagactggagggactctgcgcgaggtgggcgtgcgataacatcacaaaggatcagctggatgagctggaggagaacatctatctgtcggattttcattcttccaagggaaattccgagcaggtggtggagctcgacaacaagttccatgaaattttatacgatgcgtcaggcagcaaggaactgcgccacatcctgcgggattttcaccattacgtgcagcgcgtgcgcaaggtgacgctcgccgtgcaggagagagcggtcaattcaaacgaggagcaccgcaagattgtggaggcgctaaagcagcatgacggggccagggcggaagaactggcggacgcacatatgcgcaacaccattaacaatatggatcattacggctgggacaatctgctcaagcagtaagagcggaagatgccatgtcagatagaacagaatcacagcacagaaaggaagtaaccatggaaaaaatcaaaatgacaacgccacttgtagagatggacggagatgagatgacacggattctctggaaaatgatcaaagacgaactgttgtatccgtttatcgatcttaagacggagtattatgatctcggactggaacaccgcaacgagacggacgatcaggttaccgtagattctgcaaatgcaacgaaaaagtacggggttgctgtaaaatgtgcgacgattacgccgaatgccgcccgtatgacggagtatcatctcaaggagatgtggaagagcccgaacggaacgatccgcgccatgctggacggaacggtgttccgtgcaccgattatcgtcaaggggatcgagccgtgcgtgaagaactggaaaaagccgatcacgatcgcgagacatgcatacggcgacgtctataaggcgagcgagatgaagattccgggaccgggcaaatgcgaactggtctacacggcggaggacggaactgagacaagagagctgatccacaattttaccggtgcgggcgtggtgcagggacagcacaatctctgcaattccatcgagagctttgcgagaagctgctttaactatgcacttgacacaaagcaggatctgtggtttgccaccaaggataccatctccaaaaaatacgaccacaccttcaaggatattttccaggagatttttgacagcgagtatgcgcagaagttcaaagatgccggcatcacatatttctacacactgatcgatgacgcggtggcgcgtgtgatgaagtcggagggcggctatatctgggcgtgcaagaactatgacggcgatgtgatgagcgatatggtatccagcgcgttcggttcgctggcaatgatgacctccgtgcttgtcacaccggacggaaagtacgagtacgaggcggcgcacggaaccgtacagcgccattactataagcatctgaagggggaggagacctccacgaattccgttgcaaccatttttgcatggacgggcgcactcagaaagcgcggagagctggacggcagtcacgagctggaagagtttgccgacaagctggaaaaagcttgtgttaagaccatcgaggatggtaaaatgacaaaagaccttgcgctgattacgaccatccctaatccggttgtattaaacagtgaagattttatcaaggcaattcggaacacgttagaaggaatgttatcattatgattttatcctgtcagaatatttccaagtcattcgggacagacgaaattttaaaaaatgtaagctttcatattgaagcaaacgaaaaagcagcgattgtcggcatcaatggtgccggcaagtctacgctgcttaaaattattatgcagaaagagacgccggataccggtgaggtgattcttgcgaaagatgccaccatcggctatctggcgcagtatcaggatgtgtccgggcaccggaccatctacgaggaagtccttgacgcaaagaagaacatcatcgagatggaggagcgtctccgcgggatggaggcgcagatgaatgcgctcacagggcaggagcttgaagcgcttctggacgggtatcaccggttgagccacgagtttgaactgctgggcggctatacctaccgcagtgaagtgacgggaatcttaaagggactcggctttgtggagagtgaatttgaccggcagatgagcgaactttccggcggacagaagactcgcgtgtcactgggcaagctccttgtgacaaagccggatgtcctgcttttagacgagccgaccaaccatctggatatggaatcgatccggtggctggagggatttctgatgaactataagggagcggtcgtgatcgtgtcgcatgaccgctattttctggatcgcgtcgtcaccaaggtggtggagatttttcagcaccaggggtatgtctaccaggggaattacacggaatttgcgaagaaaaaggcgaagatccgggaagatctgttaaagcagtattacaaccagcagcgggagattaagcatcaggaagaggtcatcacaaagctcaagtcttttaaccgtgagaaatcgattaagcgggcggagagccgtgaaaagatgctggataagatcgagcgccttgagaagccgacggatgagaacacggacattcatattgtgctcgagccggatgtgacaagcggtaacgatgttcttacggtggagcatttaaggaaagcgttcggcacacacacgctgtttaccgatctctcctttgagattaagcgcggggagcgcgtggcattgaccggcaataacggaacaggcaagacgacgattcttaagatcatcaatgaactgatcccggcggacggcggaaccattgtgctcgggtcgaatgtgcacatcgggtactacgatcaggaacatcagctgctccacatggagaaaacgatttttgaggagatcgcggatgactacccgcagctaaaccacacgaagatccgcaatgtcctggcagcgtttttatttacgaacgatgatgtattcaagcggattgcagacttaagcggcggggagcgcgggcgtgtctcccttgccaagctgatgctttccgatgcgaattttctgattctggatgagccgaccaaccatctggacatcacatccaaagagattttggagtcggcgctaaaccagtacaccggaaccgtctttttcgtgtcgcacgaccgttattttatcaatcagaccgcaacccggattctggacttgacgggcgggacgattgtcaactatatcgggaattacgattactatctggaaaaacatgacgagctgacccggatctatgtggaggcggagccgcaggcgcaggcggcgcagatgacggaacagaccgtggcgcaggacggaagtggaacggacaagaaagcggactggcaggcgcagaaagccgagcaggcgcgcatccgcaagcttgagaatacgctaaagaaggcggaagagcgcattgccgagctggaggatctgatcgccggcattgatgaggagtgcgcagatcctgccaatgcaaccaattccgcgaagctcggcgagctgaccggcagacagaatgaataccggagcgagctggaaaaatgctacgaggaatgggagcaggtatcgatggagcttgagtcgtgagggatgccgtctggttgttaaatttttgacacattgacagatatctggtttatcactataataaaagagatgttttgatagaaaggtgggcatcaccatgcaggaaaaagaaatatcacaggctgtcattcgtcgaatgccgcggtattacagatatctgggagaattgctggacgccggggtagaacgtatttcttcaaatgatctgagcctcaggatgaatgtcaccgcatcccagattcgtcaggatctcaataattttgggggatttggccagcagggatatggatataacgtaaagtacctatatgaggaaatcggcaagattctaggactgaaccagcagcacaatattatcgtgatcggtgccggaaatctcgggcaggcactcgccaattacgtgaagtttgaaaagcttggatttatgatcatcggactgttcgatgtcaatccggcgttggacggtgtgactgtgcgcgggatcaagatccgtatgctggatgagctggaagatttctgtagagagaacaaagtagacattgcagcgcttaccatgccgaaggaaaaagcggacgccattgccaaccgtctggtcggtcttggcattcatgcgatctggaattttgcacatgtggatctggaattgatcaataaggacgttgttgtggaaaatgtccatctctcggacagcctgatgcagttatcctacaatattgtgaagaatcagcgcgccaaagagaacagccgtcagacagattaaaagaggtcctgcatagcaggatctcttttttactctatagggaactttgttccagtgttttactgaaataaaatgccgggtgtgatgccggcaggcgggagggaaaagatgcgatatatcgtaaacagccgggagatgaatctttatgacagccggacaatcgaggaatttcatatgccgcaggcagtgttgatggagcgggcggcgttttcctttgtggagacactgcgccgggaaaaacggaatacgtcaagaacactcgtcgtctgcggcagcggcaacaacggcggagacggctatgcgatcgccagaatgctcatgcaggcgggaaacaccgtcgatgtattggaagcgccgcacacaggaaaagcgtccgtcggcaatcagctccagaagaagatctttcttgcgtacggcggtaagatcctcacggaatttccggaggggaagtcctacacgctcgtgatcgacgcggtattcggcgtgggattatcgcgcagtgtggagggagaatacgcatcgttaatcgaccggatgaatgccatggaaggggcgaaggcggcggttgacattgcttccggcatttcggcggacaatggaaatgtgctgggaaccgctttccgggcagatctgacggtcacattcgcgtttgaaaaggtgggatgcctgctgtggccgggcaatcagtacgccgggaaagttgttgtggcagatatcgggattacgccggatgcattcggggagcgcaaaccggcggtggcggtgttagaagacgtggatctctccattcttgccgcaagggagagccactccaacaaaggaacgttcggcagacttctcgtgattgccggaagccagggaatgtccggagcggcatatctctgcgcgaaggccgcatatgcaagcggctgcgggctggtgcgcatttttacaccggaggaaaatcgcgccattttacagacgcagcttccggaggcggtaattacggcgtattcctccaaaaaggcggagacaccgcttctttcggaggccatgagctgggcggacacgatcgtgtgcggaccggggattggcacgacggatgcggctgcgtggatggtccggacagtgatcaagaatgcggcggttccggtgcttttggatgcggacgcgctgaatgtgattgcaaaagatacaaacctgctgcttctgccgcacacggaactcgtggtgacgccgcaccttggagagatgagccggctgactggggattctgtggcgtatctgcagaatcatctgattgaggcggcggatgaattcgcaagacagtacaatgtaatctgcatcttgaaggacgaacacacggctaccgcgattccgtacagccagacatggctgaatgtatccggcaatgccgggcttgcaactgcgggaagcggggatgtcttaagcggcattatcggcggaatgatggcgcagggaatccgtgtggagcaggcggcgccgctcggtgtctacctgcacggaaaggcgggcgaagcggcaggcgcgcggcgctccatgcgcggcatgacggcgtcggatattcacgacggaatgtgcgagatcctggccggactggaacagacgcagtcacagccgggaaaagatggcatatcatagtgttgggaaaataaaaacaaaatggaatacacccgtgaaaaatggcaatactatccgtaaaagatccagagagaaatggagtggaaagtatggtaattcgacgtggggatatcttttatgcagacttgcggccggtggtcggctcggaacagggcggcgtgcggccggtgctcatcatacagaacgatgttggaaacagacacagtccgacggtcatctgcgcggcaattacatcgcagatgaataaagcaaaacttccgacacatgtggaacttgacagccagaaatatgcactggtaaaggactccgtggtgttgttggaacagctgcggacgatcgataagacgagactgaaagataaagtgtgccatctggatcatcagatccttgtgaaaatagacaaggcgctggagatcagtctggaactctatacataacttgactattatgcgcgaaaatgttatgatttctgatgttttagtgtgtaataccggagatacgaaagaaaggaaactatatggatgatggttgcagccccactgtgggtatcctcatttttgcaggatttgtcatattagactttgtggtttttggctttatcgccgccatgcagaatttgaatgaggctgccatagaacgtctggcgggagaagaagaccgcggtgcgggacttctgcggcgctatacggataagaatgaacgatatacgcatgtctgcgaactggtggttttaattgtgcatatgctgctcggttttctggaggtaccgctctggcgcgcgtattttctgccggaagatgccggcagtgtcatgtcggttcttgtggatgtcatcatttttgtgatcctgattctcattgtgctggtgtttggaatctacacgccgcagaaagtggcgtcaagaaagccggaagcctgggcactgcgcctggcgggaccggtacatgtggtggagcttctttttttcccgatcatattcttaacggacggtctatccaaccttctggcgcgcgtgttcggcgttgatccgttgagcgatacggatgatgtgacggaggaagagattatctccatggtgaacgaaggtcatgagcagggtgtgctccttgcaagcgaggcggagatgattcataacatctttgagttcggcgacaaggaagccaaggatatcatgacgcaccgcaagaatatctgtgcgctcgacggaaccagaacgttccgccaggccctggagttcatcaaggagaacaactattccagatttccggtgttcctggatgacatcgataacattatcggtgtactacatatcaaggaggctctggaattgagcctggatgcggcggtttacgacactcaggtctctaagatcaaggggctgatccgcgaggtggatttcattcccgagacgcgcaacatcaattccctgtttgccatgatgcaggcagccaaaagccacctggtgatcgttgtggacgagtacgggcagacggcaggcattgttgcgatggaagacattctggaagagattgttggaaacatcgaggacgagcacgacgaggagacgaacatgatcgaactgcagccggacggaagctatctgatgagcggtatggctccgtttgacgaggttgtggaagtgctgggcattcctctggacgaggaggatgacttcgagacattaaacggtttcctgatttcactgatcgataagatcccgagtgacgacgaggtattttcaacaaccgcgcatgggtatctgtttgagattctttccgtagagaacaagatgatccagaaggtacacgtgatcaaacttccggaggagaaggcttcggacgtcgaactggcagacgggacttgccagaatgaagaatagatgttaaaataataaaccggatttcaacagaaaagaggaaaaaacatgtcaggacattcaaaatttgccaacattaagcacaagaaagaaaaaaatgatgcggcaaagggaaagatttttaccattatcggaagagagattgctgttgcagtaaaagagggcggtcctgaccctgccaacaacttcaagctggcacaggtcatcgccaaggcaagatccaacaatatgccgaacgatacgatcgagcgcggtatcaagaaggctgctggagacggcaactcggtcaattacgaattctgtacttatgaaggctacggtccgagcggaaccgccatcatcgtaaagtgcctgacggacaataagaaccgtacggctgcgaatgtgcgcaacgcgtttacaaagggacacggcagtatcggtacacagggctgtgtatcttatatgtttgatgagaagggacagattattgtcgcaaaggaagattacgagggagatgcggatgagctgatgatgcaggctcttgacgcaggagctgaggatttttccgaggaggaagacagctacgagatccttacagcgccggacgattttgaggatgtccgcagagcgttggaggatgcaggtattccgatggcagaagcttctgtgaccatgcttccgcagaactatgtggagctaacagcggaggaggatctgaccaacatcaaccgtattctggatcttctggatgcagatgatgatgtgcaggaagtatttcacaactgggatgaataataaatttacaaagagagggcagaccataacagatggtttgtcctttttttgtaaaacgctggaattgtagggtgaaatggtatatcataatattgtatatgctttctgcgaaaaacaggatgtttccgatacaaggaggtttttatgaaaaaaatactttttgcagcttctgagtgcgttccgtttatcaagaccgggggacttgcggacgtctgcggcgcgcttcccaaggaatttgacaaggaagagtgggatgtgcgggtggttattccgaattatagctgtattccggaaaaataccgcagccagtttgagtatgtgacgcatttttatatgagcgccgggacttatatccaggacaagtacgtcggggttcttcagtatgtgcttgatggcatcacctactattttatcgataatcaggaatactttaactgcatcgtgccttatggggacatccggtttgacattgagaagttctgtttttttgacaaggcggtactctccattttaaaacagatcaatttccggccggatctgattcactgtcacgactgggagacgggactgattccggtttatctgaaaaatgagttccaggcggactccttttactggggcatcaagtcggtcatcacgatccacaatttaaagttccagggaatctgggacatgaagacaatgcagggactgaccggtttctcggcggatctgtttacgccggataagctggagttccagaaggacgccaatatgttaaagggcggactggtgtatgcggattacatcacgaccgtcagcgattcctatgcgaatgagattcagacggagtattacggggaagggttaaacggtctgctctcggcaagacattacgacatgcagggaattgtaaacggaatcgactatacggtttacaatccgaagacggatccaaagatctatgtcaattacgacgccgcggatttccgcaagaaaaagccgtccaataagatgaagctgcaggaggaactgggacttgccgtcgacaagaaaaaatacatgatcggcctgatctcaagactgacggaccagaagggactcgatctcatcaattacgcgatcgaccgcattgtggacgactatacgcagttcgtggtcatcggaaccggtgatccgcagtacgagaatatgttccgccactatgcatggaagtacggcgaccgtgtctcggcgaatatctgctactcggacgaacttgcccacaagctgtacgcggctgcggacgcgttcttaatgccgtcgcggtttgaaccgtgtggactgacgcagttaatctctttccgttacggcacggtgcctatcgtgcgtgagacgggcggactccgggataccgtaaagccgtacaatgagtacgagaacaccggagacggattctcgtttgcaaactataacggagacgagatgttaggcgtgatcaactactccaaacatatctattttgaccgcaagaagcagtggaaccagatgattgaccgcggaatggcaaacgactattcctggaacaattccaagggacgctatgagggattgtaccgctatcttctgggagaagtgtagcgtgaactgacataatatgacgctggatgatacatactaagcagggtgcaattttgcaccctgcatttttatgcaattagtaaaaagagaagaccgaaggagaagaagaaactatgtcagaaaaacaggaacagaaaaatgaggacatccgggaattcggacaggttgcgttaaataacaaccgggagaacaaccggatctcacttttaacgattataggagagattgaggggcacgactgtctgccggcgacgaccaagaccaccaagtatgaacatgtgcttccgaagctggcggagatggaggacaaccgggatacggaaggaatcctgctgcttttaaatacggtcggcggcgacgttgagagcggactcgccattgcagagatgattgcgtcgatcagcaaaccgacggtatcgctcgtgctcggaggaagccattcgatcggcgtgccgctcgctgtctccacggattactcgtttattgtcccgtcgggcaccatggtgattcaccctgtgcgcatgagcggaaccgtcataggcgccaagccgacctacgattattttaagcagatgcagaaccggattttaacctttatcgcatctcattcaagggcgggcgaagagaggctggaggaactgatgatgaacacgggaatgctgacaaaagaccttggaaccattttagtcggggaggaagcggtccgggaagggctgatcgacgccgtaggcggaatcgatgccgcgtttttaaaactgcatgcgatgattgatgccataaagggaaaaaattattaagaaaccttttaatgacaaccgccctcaaatatgttaaaattggtcatgtatgtataagtttgacagattattacgaatcggataaggaggctgccatgtcattattacaggcgatcttgatgggcattatacagggactgaccgagtttttgccggtgagcagttccgggcatctggcactttttaaaatactgtttgatgtcaataccgacacgggaattttatatgatgtattgcttcacgtgggcacgttgattgcaattttcctggtatactaccgggacatcttaaaactggtggtggatggatgctgcatcatccgcgatgccgggtacaatatgattgtcttcttccggaataagaccggcaaagagcagagggcgtaccggcgcgtgatcaacagcagctaccgcaaattcgccatgctgattattgtatcaacaataccgaccggaattatcggttatttttgcaaggacgttgtggagatggcttccgagattctgattgttccgggcatctgccttatcgtgacggcagtgctgcttttgatcgcggatcactgcaaggatggcgacaagcttccgaaaaatgtcacctacacggatgcgttttccgtcggaattgcacagggaatcgcgacgctcccgggactttcgcgttccggtacgacgattaccgcctgcctgctcgcgggctatcagcgcaatttcgctgtcaaatactcgtttctgatgtcgataccggcgattcttggcgcgcttgttctcgaattaaaggacgccacagacctggcggtgtcgggaacggagattgtctactatgtgatcggtatggcggttgcggcagttgtgggatatatctgcattaagacgatgcttgtcatcgtccgcaaaaagaagtttaccgtttttgccatttactgtctgctcgttggcgcattgtccatcggcggttatttttatctggcataacggttttggaggttagtaagttttggcaacagggaataaaaagagtgcatctgggaaacgaaaggcacagacaagccggaagggaaatacaggacggaagaaaaagacggctgcacagcagcaggaggattttaccagggaggtcattctctggatcattgtagcggtatctattttattatttatcagtaatttcggaatagggggaaccatcggcaatgctgtgagccggttcttttttggcgtcatgggactgatcgcgtatgtgttcccggtgcttcttctggtcggtaccttttttgctgtttcaaacaggggcaaccgggtggcaaccgtgaagcttgtggcgatgattctgttcgatctgttcttatgtatgctgatcgagctgttgaccaagggctcggcagttgacggtgccgcggcggcatatagttacagttttgaacaccggacgggaggcggattcatcggcggacttctgacctggattttctgtccgaatttcggtctggcgggttcttacgtcatcgatgcgatcatgttaatcatatcactggtgttaattacagagcgctcggcgctccgcggaatgcaaaagggcgggaaaaaagtctacgaatccgcgcgcagcggaaatgagcgccataaggaacgcgtgagaatccagcgggaagagcgggagcagcgcagagaggaacaggcattgcggcggatggaccgcaaggtggaaggggttgccattgacacccgggtgctgccgcggcagaatgccctcgaacattccgatgagatcagtgagctgaatgcggaggattatctggagatgccggaggtactggaagaaaagattgtgccactcacggcagacggcggatatccgtctgcagagaatctgacgccgtctgcattctctgacgaagcccttgcggccgtgtcgacggagacttcgcagaacgtatccgcatggaggccggaaggcggggcagcgcagggagcatcctggaataccgcaccgatggaagcatcgtgggatgcggcaacgaagccggaagacccatggagcagcgcagaagcacaggaacagcgagatccttggagcagtgcggcagcacagcagccggaagatccctggaacactgcagaagcacaggagcagaaggatccacggagcagtacagcagcacaggaaaccgcgtgggaggaggctgcgccggataccacgatgaaagagacaacggaggcaccggcagtggcgccagccaggacggaagttgtgtccgcaggcggaggaaatgccgcacataccacatctgcatctgcggcatccggtgagagtgtaccggcagagaagatgcctccggagcgcccgtatgtattccctccggcagaccttctgacaaaggcggcgaacaaagccggcgattccagacagcatctgcaggagaccgcgatgaagctgcaacagaccttaaagaattttggcgtgaatgtcacgattaccaatatcagctgcggtcctgccgtgacgcgctatgaattgcagccggagatgggagtaaaggtcagcaagattgtcaatctggctgacgacatcaagctgaatctggcagcggcggatattcgtatcgaggcaccgattcccggaaaggcggcgatcggtattgaggttccgaacaaggaaaacgtcatggtttcttttagagaactggtagagtcggaagaatttaaaaagcatccgtcaaagatttctttcggtgtcggaaaggacatcggcggaaaggtgacggtggcggatattgccaagatgccgcatcttctgattgccggtgcgacgggttccggtaaatccgtatgtatcaacacgatcatcatgagcatcctctacaaggcgaaccccaaagaggtcaagctgattatgattgatccgaaggttgtggaactgagtgtttataacggtatcccacacctgatgataccggtggtcactgacccgaaaaaagcggcgggtgcactgcactgggcggtggatgagatgacagaccgttatcagaagttcgccaatgcctccgtgagagacttaaagggctacaacgcgaagatcgaatccctgccgacgatcgagggagatccgaagccggaaaagctgccgcagattgtgattatcgtggacgagttggcggaccttatgatggtatcgccaggcgaagtcgaggaatccatctgccgcctggcacagcttgcaagagcgtgcggcattcatttgatcattgcgacacagcgtccgtcagtcaatgtcattaccggcctgatcaaggcgaatatgccaagccgtatcgcctttgccgtgacttcgggcgtggattcgagaaccattctggatatgaacggtgccgagaagctcctcggcaagggagacatgttattcagcccgcagggaattccaaagccggtgcgtgttcagggagcgtttgtatcggatgaggaagtatctgccgttgtagggtttatcaaggagcagaacggccaggtgacctacagtgcggagatggaggagaagctgagcaatatggagtctgccaacaccactgttgccattgattccggcgcggatgcaggggacggcagggacgtctattttgcagatgcggcgcgtcttctcatggaaaaggaaaaaggttccatcggcatgcttcagcggtattttaaaatcggttttaaccgtgcggcccgcattatggatcagcttgaggaagcgggtatcgtaggtcctgaggaaggcacaaagccgcggcgggttttaatgtcacccgagcagtttgagcagtatgaagaggaatatctgtaacaagattcatataataaaatatacaaagccgctctggcggcgggatggaggagacattatgaagagtgatattgaaattgcacaggaagcccggatggtacatattcgcgaggttgctgcaaagcttgacattccggaggatgatctggaattgtacggaaagtacaaggcaaagctttcggatgaactgatctgccgggtttccgacagaaaagacggaaagctgattcttgtgactgcaatcaatccgacaccggcgggagagggaaagaccaccacgagtgtcggcctcggtgaggcgttcggcaggcttgggaaaagggcggtcatcgcgttaagagagccgtcccttggtccgtgttttggaatcaagggaggggcagccggcggcggatatgcgcaggttgtgccgatggaggatctgaatctgcattttaccggagattttcatgcaattacctctgccaataatctcctggcagcgcttttggacaaccatatccagcagggcaacgagcttggaattgatccgcggcagattgtctggaaacgatgcatggatatgaacgaccgtgttctccgcaatattgtcgttggtctgggaagcaagatggacggaatggtaagagaagatcattttgtcatcacggttgcgtcggagattatggctattctctgtctggcggacgatatgcatgacttaaagcgccggctcggacggattattgtcgcatatacgtttgacggaaagccggtgaccgcggacgatctgaaagcgaccggcgcgatggcggcactgttaaaggacgcgctaaagccgaacctgatccagacgttagagcacacgcctgccattgttcacggaggtccgttcgccaatattgcgcacggatgcaacagtgtccgtgctacaaagacagccttaaagctcgcggattatgtgattacggaggccggctttggcgcagatctcggcgctgaaaaattcttcgatatcaagtgccggaaagcaggactggcaccggatgccgttgtgctggttgcaaccgtgcgtgcactcaaatacaacggcggcgtggcgaaagcggatcttggcacagagaatctggatgcattgaagaaggggattgtcaacctggagaagcatattgagaacctgcagaagttcggtgtgccggttgtggttaccttgaactcctttgtcacagacacaaaagcggagacggattacgtggagcagttctgcagagaacgcggatgtgagtttgcactttccgaggtctgggaaaagggcggtgaaggcggcattgagcttgccaacaaggtgctgcttacactggagcagaaggaaagccatttcaagccattatatccggatgatatgagccttgaggataagatcgcaactgttgcgagagagatttacggagccgacggagtgacctattccgcagctgccaaaaaggaactgaagagaattgccgatatgggaatgtcatccttcccggtctgcatggcaaagacacagtattctctttcggatgaccagacgaagcttggaagaccgaccggttttaccatcaatgtgcgcgaggtttacgtatcggcaggagccggctttgtcgttgcagttaccggttcgatcatgacgatgccgggactttccaagaacccggcggcgtacggtattgatgtcaatgatgacggagtcattaccggattattctaagagacagaatggaggatacgtatgacacagatcattgacggaaaaaagatttcacaggagatcaaggacgaactgcgcgagcaggttgcggaacagaaaaagcttggaaaagaagcggcgcttgcagtgatccaggtaggaaccgatccggcttccagcgtgtatgtcaataacaaaaagaaagcctgcacctatatcggcatcggttccctgtcctatgaactgccggaggagacgacggaggaagaacttcttgcgcttgtggagaagctgaatggtgatgcttcggtaaacggaattctggtgcagcttccgcttccggcacagattgacgcagacaaagtgattcgtgcgatcgcacccgaaaaggatgtggacggattccacccggaaaacgttggaaagcttgtgatcggggagccgggatttgtctcctgcacaccggcgggaatcatccagctcttaaagcgctccggaattaagatggaaggaaaacattgtgtgataatcggcagaagcaatatcgtggggaagccgatggcacttttaatgctgcgcgagaatgccacggtcaccattgcacattccaagacacagaatctgccggaaatttgcaaaacggcggatatcctgatcgttgcaatcggaaagccgcagtttatcacggcagattacatcaaagaaggggcggttgtcatcgatgtgggaattcaccgcgatgagaataacaagctgtgcggggatgtcagatatggtgaggttgcgccgcatacgtcggcgatcacaccggttccgggcggagtagggcctatgaccattgcaatgctgatgcataattgtgtggagtccatgttgcagtaacagatgtagaatccatatggatgaaagagtgagaggaatcgtttcatatgaaatgtgcaaagtgtggggcagagatcaaagagggatgtatctactgctccgtgtgtggaaatgcggtacagattgtgccggattacagtgtgttggaggatgactatctgcgttctcttctaaaagaggaggaatctgccgggaaggaaccggcgccggcacaggcaaagcagcaaaagcccaaacagccgcagaggaagaaaaatcgccggctgccatttctcattgggggaattctgctggtgcttctcgttctggcgggaattctgattaaggctgcgatcgatcaccggaatgccaattcttacgactatcagatggaacaggcggccatggtggctgatgcgcagaatgacggggaggcacttgactattacgagcgtgcgctgtatctgtatccaaacgatattaccgcgcgtgagaagatgattgaaatctatgaaaaacagaaaaataccgatgcggcaatggtgctcctgattgagatcataaagcttgatcctgccaatgaggacgcatacagagatctgatcgctatctatgatgcgagggaagattacgacagcattctggatcttgaagcggaggtcgatgccgaggatcttaagaataaggataagattctggatttgtttgcggattacatgacatctgcaccgctgattacggatcctgagggagatgtgccgtccggaaagtatgatgaggcgctcgaggtagagattgcgtcgacagacggggatgccatctactatacgatcaatggagatgagaacgaactggatgccaggacagggacgaggtattttgtcggaaacccgctcgtctttgatgagagtggcaaatataccatcgcggcggtctgccggaacgataagggaatctacagttccgtgacgtatgccgattttgagatcgaacttgcaccaccggattttgcagaggtgtcgccggacggaggccgtttttatgagccgacactcgtgacgctgaccgcagaggatggatgcagcatttactatacctgggacggaaccgatcctaccacggcgtctgcgcgctacacggagccgtttgaggtgccggagggcaacaatgtcctgtccgtacttgtggtggacaaaaagacgggattggatagcggtgtttaccgtgccaattttatctattacccgtaaaaaggaattgccgcaataagcatagaacttcctttgggtgctaagtaatattacgggaagaccacacaccgtgggatttcagatgaaaatgcggatggaatattcgtttgagaaaaatgtgagcatttcttccggctgaatgtttacatcggattccgtgtctcttccacgtttgaacaatccgacgggtgcatgtccggcacaccggagacaatgggcggactttctggtgtccctaatggcacctcttcacagacattataaaaccgcgcgaaccgaaactcgttgccatctgctattaaaaacagggcagatggcaattcagacatcggcttcgcgcggttatgtttttgttcagaggtgccataagggacacacaaaaaagtcctacaaattgtcttccgggatgcggacatgaccctcggagtgctccaaacttggaaagacacggatcatcgaagatgcaaacatttggccggttagaaatgccacatttttgaaccgaatgtccatccgcatttccacatgaaatccccaagtgtgtttcttataatagtattacttatcaacgcaaagcatgatatgcttattgcaccagacccttttctttggggaagaagatcactcgtcgtccgccggtaaaaattcgatgtggtctgtatccattgcaccgactctggcaagtgcatacacttcggttccctgatcaaccagcttttcacgtcctggctggaaagacttttccaccagaacgccgagaccggcgatggtcgcatgtgccagacgcagaagacggatcgctccggtcgcagcctcaccgtttgcaaggaaatcatcgatgattaagacgtgatcctcctcggagatgtacttcttggagagcgtcagctcgtagttcgtctctttggtaaaggatgtgatcacagtctggtagagattatcatttaaaatctgagaaggctgcttcttcaaaattaccataggaacgcccagcgcagatgcggtcatgagtgcaggagcaattccagaactttcgatagtaaccactttcgtgatgcctctgcctttaaaatgtgcggcaaatgcctccccgatctgtgccatgagcaccggatccacctgatgattgataaaactgtctaccttaagaatgtctttgtttaatgcctttccctcggaaagaatcttttcttccagtaatttcaaaatcgtcacctctcaatagtatatttgatggttctattgtaccataagtcgctgcatgaaagaagtgctgttttggagaaatgtcccgattttagaaaagctcggcgtagagcagttcaatcatatgatcggtaaaggattccgaaagggagggatactgatgaagcagcagcttttccatcacttcgtagcgggaaaaatacagcgcctcctccggctgatcgttgtcgacggactgatcaatgacatcggcacggtaggtatccagaaaccatttgaggatctcatcctgcagtgcatcttctgttgcagtcgcatctttgagctgtttgatctgtccgaaggaacggatgccgatccacaaaaagataacgaacatgattcccatgacaagacccatcagaattctggcggcaccggtaatatggatcggaagaacgccgcagaaaaacagcactaaaagaaccagtccgatgatgccgaccccggtaaaggtgtaggcggtagacttcatatcttcggtctgggaagccttggaccggtaggcgtgtgaatgtgcagtaagcggcggagtatctcctctgccgccttccgctgccctgacggtggaagctgccgaaagttcttccatgtcatcaggggagaaggcatccggactgtcttttgatttgtcctctgatatggagagcgactccaccagatccacgccgcagtccggacagcggacgattcccgctacatattcgtttttacattctggacaccacataataagttctcgctttcttagttttcttttcctatattataggagattttatagactgccgcaaccaaagaatgttataatgaacctgctatgaagattacaattttatgcgttggaaaaatcaaagaaaaattttacagagatgccatcgaggaatacgctaagcgcctgacgcgctattgcaagctggaaatcatcgaggtcgcagatgaaaagacgccagacggcgcaagtgccacggaagaaatgcagatccggcaaaaggagggggagcgtgtgcttgcccgcctcgagaaatgcaggcagagcagctcctatgtcatggcactcgccatagacggcagagaactcgattcggtcgaactctcacagaaactggaaaaactgggaactgacgggatcagcaatgtgatctttttgatcggtgggtcactcggcatgtcaaaagagctgcttgcggcggcggattttaagctctctttttccagaatgacgtttccacaccagctgatgcgcgtgattctgctggagcagatctaccgcggctaccgcatcatgaaccgggaaccctaccacaaatagcggcaggctattcggtaaagtccctggaatacagaacggttccgtccggatttaaggcggtcagccggatggcgatgtcgtttatgccggtctcatctgcaatctgcgcgcgcagcgaggaaaaagtggaggcatagctgtcaaaaatggcgtcatacagctgcgtcagtgcgtcggcgtcggcgtcatccgacatatcatacgccttagaaagcgtgtactggaacactaacgcatcggaatctgcggtgacaatgtccagggtgtatcccagatcctgggaattgacggcgtctgtcatctcctgaaactgatccgcctgtgtggcataccagtcatccagcgatgcttttttacatcccatcagagccattcccaagcaaaaaagtgcgagcacgcacagtaatattctgtggctttgaatttgatatccggtcataacggtctccttttccctgtagaagcttaaaaatctatcatcagtatagaagtccgccgcacgacttgtcaagcgtccgcgcggcaaatgttgaatcggcggttaaacggtgttacaataaagtatactttagaaataagggggattgcagtatgagaatgtatgatttgatcttaaaaaagaagcagggcggggaactttccacggatgagatccgctatatgatagaaggttttacggagggaagcattccggattatcagatgtccgccatgacaatggcgatctgttttcgcggaatgacgccgcgcgagacggtggatttaacgcttgccatgagggacagcggtgatgtgctggatctctcggggatcaagggggtaaaggtcgataagcacagcaccggaggcgtgggagacaagacctcactggcgctgacaccgatcattgctgcgctcggggttccggttgcgaaaatgtccggcaggggactggggcataccggcggaacaatcgacaagttagaatgttttgacgggtttacgaccgcgctctccgaggagcagtttgccgggaatgtcaataccatcgggattgccattgcgggacagactgccaatctggcgccggcggacaagaaattatacgcgctgcgtgatgtgacggcaacggtggatcagatgtcgctcattgccagctccatcatgagcaaaaagctggcgtccggaagcgatgccatcgttctggatgtcaagacgggcaacggcgcttttatgaaaaagcttgaggattccagagcgctcgcaaaagagatggtctccatcggtacgatggcgggcaagaagacggtggctgtcatcacggatatggatcagccgttgggacgcgcggtcggcaattcacttgaggtccgggaagcgattgataccctgcgcggagagggaccggctgatttcaaagaagtggtgtttgcactgggcagccagatgcttatgctcgcagggcgggcggcggacgaaaaggaagcccgcgcactgatggagggcgtgatagaagacggatcggcactcgataaatttgcccagttcgtgcgcgcacagggcggagatgctgcaccggtctatgacacctcccttctgccggttgcggggaagacactagaggtcacggcaaaagagagcggatatgtgcaccggattctggcggaagacatcggaattgcctgcatgaccctgggaggcggaagagagaccaaggagagtgcgattgatctatccgttggtattattctggagaaaaagaacggggatgcggtaagtgacggtgaagtgcttgcgacgatttatggcaatgatgatgccaaaatgcaggcggcgtatgaaaaaattgcccatgcctacgagatcgccaaagagccggcggctttcgtgccggtggtcagagaatatatctttccagaataagacggtatttttcctcatatagtgctatatgagaaaaaatagcagaacttcagcggggtcacagatttcgctgcgcgaaagaattgtagataacctggagcttcccaaagacctcatgctcggggcggcgatcgtgaccgtcaccggcagaggggaagctgtgatttcaaattataaaggaatcctggaatacgaggattcctttatccgggtgcagacaaaaacctgcaggatacggattaccggtgtccgtcttgccatagattattacacgaatgaagaaatgaaaataacgggcagcattgatacgatagagtacgagaactgagacgatgttgctctctgtgatcaaatattttcgcggttatgttcatgtgaagctgacgggatatgcaccggaacggttcttaaatctgtgcgggaaccggaatatcctgatctggaatttaaaaccgtgtgaaaatggatatactttttgtatcagtgtcgatgcattccgacagctgaagcccattctgaaaaaaaccaaaacgcagatccggattcagaagcgtgtggggatgccgttttgcgcgtttcgctaccgcagacggtatcttttcccggcaggcctgctttttttctgctttttgctgtatgatctgtccggattcatctggaatatcgaaatcaacgggaattcttatctgaccacggagacgattctggatttcctggaggaggaacacgcatcgtttggaacgaaaaaatcccggatttcgtgcgaggatctggaagaagccatgcggagccgctaccgggatgtcatctggacttccatcaagatttatggtacaaagatgacggtcgatattcaggaaaacctcctgtcgcaggaagaatatgaggcgaagagcgatgaaccgcaggacattgtcgccgccaaagacggcgtgattaccgagatggtgacacgcgcgggcacgccgcttaccgcggtgggagcggaggtaaagaaaggcgacatcttagtctcggggcgcattgaagtgttaaacgacgacggtgagatcatgcagtacctctaccgtccgtccgatgcggacatcaaggcgaaggtactctattcctaccgggatgtgattgatggcacctgggtggagatggcgccgaccgggaacacgaaggagtgctacagcatcacgctgcttgataacgtgttcgactggccgtttttccggaatccgtttgcagaataccaggtgcagacggagagcaggcagctccatgtggcggacaatttttatctgcccgtgtggctgaataaaagtgagttcacagaggtcgagcaggtgcggcacgagcgcaccgaagaggagatccgtcagattgccacaaagaatttctcggattacatcaaagatttggaagaaaaaggtattcaaattatatcaaaaaatgttattataaaaagtacgggtgaaaaatatgtggtaagcggcgatctgtgggcgcacgaatccattgtttcctatcagccgacagaggtttacgataccacaatgcaagaaaggcagaatgaaaatgagtctgactgaagtttcgttaaatataccgacagaccacatggcgaatgtgttcggtcagtttgatgtctatatcaaaaaaatcgagcgtaccttaaatgtgacggtggttgtccggggagaagatatgaaaatcctcggagacgaaagacgctgcaggcgcgcgcaggatgttttcatgcagcttctggaattgtccaaacgcggaaatgtcatcacggaacagaatgtcaactatgcactggcattgatggcggaggaaaaagagtcggcgatcgtggagatcgaccgcgactgcatctgccacacgatcaacggcaagccggtaaagcccaagacactcggtcagaaagcctatgtggatgccatccgcgaaaagatgatcgtgttcggcatgggaccggcgggtaccggtaagacttatctggcgatggcgatggcaatcaccgcgtttaaaaatgaggaggtcgggcggattatcctcaccaggcctgcgattgaggcgggggagaagcttggcttccttccgggcgatctgcagagcaaggttgatccttacttaagaccgctttacgacgcgctgtatcagattatgggggcggaaagcttccagaagaatatggaaaagggactgattgaggtggctccgcttgcctacatgcgcggacgtacgttagataacgcgtttatcattctggacgaggcgcagaacacgacgccggcgcagatgaagatgtttctgaccagaatcggtttcggttcaaaggcggtcatcaccggtgacgccacccagaaggatctggcgccggatgccgcatcgggcttggacattgcgctgaaagtgctgcgcaatgtggaggagatcggtatctgcgaactgacaagccaggatgtcgtgcggcatccggtggtgcagaagattgtcaaggcatacgaggattatgagaagcgcgccggtaagacgtccggcacgagaaagaacacgagcagaaccggagcgggcagaaccggtgcgagaagcaggagagagaacacgaatggatgatcgctatgtggcaaagagagtaatatatctgcttggcatgtctgccgcaacgatcctgtttacgacagcggcggcatttatcaggggacagtatctcgacgagtggatcgtccttgttatcatcaatctggtatttctggcgttgtggttctttttattggagcactgccggatgaagcggagcattgcgggaaaccgtgagacaagctaccggcgtatttttgcagggtatctggcgtcgcttggcgtgacggcggtctgtcttgtacttccggaattttcaagacctgtgatgctatctgccattttgatgctcggtgtggggaatatcgagctttccctgtgcagcggactctttttctgcagcctgctcggtcttttgtgcggtggaaccatccatgaattctccatgtatatcctgctggttctgatcggagcggtggcagcggacgcagtggaaaacagcaaaaagcagttctggtatgaatggtttgccggcatggcaggcatgcttcttccggttctgttctactatctgacctaccgggagatcagtgtccggatcatggtatctgccgtggcggacggtgtggtcgtctttttgtttttgcatctgtgctaccggaagttagcggatgcaagaaatgcggaagtcgatgaggtcatggtcgacatcaccgatgaatcctatccgctggcgcgggaactggcgagtttttccagggcagactacagccatgcaaggcgggtaatgcttgtggcggcgcgatgtgctgctgtggtcggggcagacgaacgtgtgtgcagcgccgcggggatgtattaccgtatcggcgtactggagggcgcaccgcttgcaaaaaacggtgtgaaaatggcacagagagcctgcttcccggagaaggtaatccgcattatcggggaatacaacggggaagaggccctgccatccaccatcgagtcggcgattgtacatatggtggacgggctgttgaaaaaactggaggttctggatgaggataccgttggcagcaactggaaccaggatatggtgatctatcagaccttgaatgaatattctgccgcggggctgtatgaccgttccgggcttagcatgaatatgtttttgaaaatacgggaatatcttgtgaacgaggaggcattactggtatgagcctgaatttagaagtcgaagtggacgtgccatttacatttgattatgaagcgctggcgggcgaggttgtcgcttttaccatcgaccatgaaggttttccttatgaggcggaagtgaatctgacgctgacggacaatgaaggaattcatgagatcaaccggatgtaccgacagattgatgcaccgacggacgttttgtctttcccgatgctctcctatgagcaggcgggcgatttctcggcgttggaagaggattatgaggataattttaatccggataccggggagatcatgctgggagacattgtcatctcggtgaaccgggtgagagagcaggctgccgcctacggacacagcgagcgcagggaatttgcgtttctgatcgtgcacagcatgcttcatctgttcgggtatgaccacatgacgccggaggacgcggcagtcatggagccgaagcagagacagattctggaggagatgaacatctcgcgtgattaacgaacggcggcgccgtggcgcttccgaaaggatttgaggtacttttatgggcaataaaaaaaggaaaaatacgacaagttttctggcgcagggcacaatcctcgcggcggcttcgctgatcagccgtgtgatcggcctgatttaccgcatgccgctgacggcgattattggggataccggcaacgactattatggcagtgcctataccatctataatattttgttaattatttcgtcctacagcctgccgctcgcggtatccaaacttgtctcggcaaatatctcacagggcagaaggcgcaatgtctaccgcatcttaaagtgcgcgctgatttttgcgctggtgtccggaaccgctgccgcggcaattctctatttcggagcggattttattacgggtacgctgcttagaaccccactttgtatctttgcgttaaaggttttagtgccggttcttgtaattgttgcggtcttaggtgtgatgcgaggctttttccagggacttggcacgatgatgccgagtgccgtatcccagatcttagagcagattgtaaatgcgattgtcagcgtgtgggcggcgtatgtccttttttcctacggttccaaagccggagcgcttttaggcaatgccgaggattacggcgcagcctacggtgcggcgggcggaacgatcggaaccgctgccggagcgctgagtgcgctgctgtttgcgggttttgtccttgttgtctatctgcgggtgtttaaaaagacgcttcgcaaggagcggaagacaagcgcagattcgtacggagagatttttaaactgctgatcatcaccattattccggtgctggtgagcagcacgatctacaactgcaacgccaccattgaccaggcggtctacaagaatatcgcggcatggcagggatattccaagacggactacggtacctggaacggtatctataccggaaaataccaggtgttaatcaatgtgccgttggccattgcatcctcccttgcggcatcgagtgtgccggcgctctctgctgcttatgcgagcggaaaacgaggcgaggcaaagcggcagatcgggcttgccacacgctttatcatggtcgtggcattcccgtgtgcagtcggaatgggcgtgcttgcctccccgattcttcagatgctgtttggtgattcctccgagcttgcggcaagaatgctgcagaccggttccgtggccatcattttcttctccctgtcgaccctttccaacggtctgctgcaggggatgaatcggatgaaggagccgatcaagaatgcagtgattgcactggcgcttcacttgatcattctggtggcgctgatgcttgggctggatctgaacatttttgcggtgatcatcgcaaatgcatgcttcggactgatcatgtgtattctaaatgcgcgctcgatccgccgttacagcggataccgtcaggaagtgcggcgcacgtttttcgtgccggcggtttcagcggctggaatgggcgtggtggtatggcttgtttaccgtctgttcctctatctgcttcggagcaatctgatcgcaacgcttgtatcgattgttgcaggcgtctttacctacgcgacgctgcttttgatgcttaagggactgaccgagcaggaaatcctgcgcttcccgaaaggcagaacgcttgtaaaactcgcgcggaagatgcatcttttgcgttaattgaataaaaaggaaagaactggcagatacttatcgcagagaatgggaggacattatgaaacggacgataggtatttgcctttttgcggcagtgatgctgtttgccggaggcttgtgcgggaaaaacgcatttgatgcagaaaggatccgtacggcagaggagacggaggcggtcacggaagatgtcgcagtggcacagacggagcgaactgcggagagcatgcagatccagaaaacctgccgctatctgctccgcatggatgacgacggcatcttaaaagtctatgaggcggacgggataacccttttatttgagaccaacatccgtgcggaacggctttccgtgcagacgagggagcagctttccaacggaattccggtagacgatgagagagaactgtacgatctgctcgaaagctattccagctgacgtaagagaagttattcattgaatgttacagggctgtgtggtaaaattgttacggttaagaagaacggacagaatgatacagcggttagataagaggttgaaatgacagatatagatgttacggtgatcggtggcggcgcggcaggacttatggcggcggtcagtgcagccaggtgcggcgcgagaacacgggtgatcgaacacatggaccggattgggaaaaagattctatccaccggcaacggaaaatgtaattacacaaatgcagtgcaggggctttcctgttatcgtggagagaaccctgcttttgtgctacctgtttttgagcagttcgggcaggaggataccgtgcgcctgtttgaagaacttggaatctatccgaagatcaaaaacggttactattatccggcgagtgagcaggcggtgtctgtcgtggaagtgtttggcatggaatgcgattacctcggcgttgatctgtggacgtcctgcggactgcaatccattcaaaaaacctgtaccgggtatgaaatacgcaccacaaaaggcgcgttttcaaccaaaacagtgatttttgcgcccggattgctggcagcacccaagacaggaagcgacggaagtgcatttccatatatagaagcacttggtcatcattttgtagatgtggtgccagctctcgtgcaactgcatggaaaacaggcatttttcaagaaacttgcaggaattcgtgcagaaatgcaggtaacactctacctggaaaatgcgcaatttcaaccaaaaggcagccgtgggacagcccggggagaaaagcctgacacggtgtgcagtgagcggggcgaacttcagcttacggcttccggaatctcgggtatcccggtctttcagatcagccgttatgcgacaagagcgctcgcggacgaaaagcatccctacgtgctgattgattttgcgccggatcttacggacaaggagttttttgacctgctgtcagagcgcttctacgagaatacacatggcaagagcgccggggaggcactgatcggtctctttaacagaaagctgagcgaggtactgctctccgaagctggcatacggtcggaactctatgccggggaggtggcacgcgccacgttgcaccggctggtgaagtgtgtcaagaatttccgggttgatattaccggaagcaacggaatggaagcggcgcaggtatgcgcagggggcgttgacacggaggagattgaagctacaacgcttgcgtcaaagctggcagacggtatctattttgcgggcgaggtcattgatattgacggcacctgcggcggttacaatctgcagtgggcgtggtcgagcggctttgtggcggggatgcatgcagcagaggaaggaatgtcaaagcagagatgatacggatcaatcagataaaaatgccgctgcatcacaatgcggcagcactggaacagaaaatcagaaaacgtctgggactttcgggagaccaggagcttcgctaccggattatcagaaaatccattgacgcgagaaagaaaccggaactgtcgttggtgtattccgtggaggtttccacttccggagaagagaaaatcataaaaagggcaaacgatccgaatgttacgatcgtaaagcagaccggttatcatctgcccggggcggtttcgccaacgccgtccatcccgccggtgattgtcggtgcgggtcctgcgggacttttctgcgcgtatgcgctcacgatgagcggctgtgcaccggttgtccttgagcgcgggcgttcagtgacggagcgcacaaaggatgtggagcgcttctgggagagcggagtgttggatacggtttccaacgtgcagttcggagagggcggcgcaggaactttttcggacggcaaattaaatacactggtcaaggatcccaccggcaggaaccggtttgttctggaaacctttgtgaaattcggagcgccggagcagattctgtacgaaaacaaaccgcacatcggaacggatattcttgccggagtcatcaaaaacatgcggcaggcgatggaagcgcgcggcgccaggttttgctttgagagttgtatgacagattaccgcagggaagcggacggaaagatgtttgttgaggtcaaccacaaggagtggatcgagacttccagactcgttcttgcaatcggtcacagtgcgcgggacacgtttgggatgctgtatcagaagcaggatcttgtcatggaggcaaaagcgtttgcggttggtttccgcgtggaacacccgcaggagatgatgaatctgcagcaatatggagcgctgcatgcacacgaacttccggcagccccctacaaagtgacagcgaacctcgcaaacggcagaggcgtgtattccttctgcatgtgtccgggcggatatgtggtaaacgcatcctccgaggagggcaggcttgcggtcaacggaatgagctattccggacgtgacgggaaaaacgcaaacagtgcgattattgtggcggtaactcctgacgactttgcggggaaagatccgctagccggtgtccgttttcaggagatgctcgaggagcgggcattcgctatcggaaaagggcggattccgcagcagctttttggagactattgcagcaatcgtgcctcggtgtcttacggggcgtttgagagcgccacaaagggcgcatgtgtgcttggcaatttaagaggtctgctgccgcaggcactggaagagtcctttatcgaggggatgcacgcattcagccgccggattccggcttttgaccgggaagacgccatcctctccggcgtggagagccggacgtcctcaccggtgcgcctggtgcgcgatccgaagcttcttgtggctgcaggcggcatctatccgtgtggggagggcgcgggctatgcaggcggcatcatgtccgcggcgatggacggactgaaagtggcagaggcgattatgagagatatggaggagcaacgtggctgaatttacaccaatgatgcagcaatatctgcagacgaaggaagaatataaagactgtatcctgttttaccggctgggagatttctacgagatgttttttgaggatgccgaactggtgtccaaagaactggaactgacgctgaccggaaaaaactgcggcatggaggagcgcgcaccgatgtgcggcatcccgtaccatgcggtggagggatacttaaataaacttgtggcaaatggacacaaggttgccatctgcgagcaggtggaagatccgaagctggcaaagggactggtcaggcgcgaggtcatccggatcgtgacgccgggaacgaacctggatatgcaggcgctggacgaatccaagaacaattatattatgtgcatcgtgtatctggcagaccgctacggcgtatccattgcggacgtctcaaccggagactactatgtcaccgaggtggattcggagcggaagcttttcgatgagatcacaaaattttcgccatctgaaattatatgcaacgaaagtttttatatgagtggtgtcgatatagaagatttaaggcatcgactcaagattacaatttatgcgctggagacatggtattttggggatgagcttgcagagacaacactgcttacacactttaaggtaaagagtctggaggcgctgggacttgccgattatgactgcggcatgattgctgcgggagcactgttaaagtatctgtacgagacacagaagaacgatctcaacaacatttccgtgattcatccgtattccaccggaaaatacatgatcatcgacagctcgaccagaaggaatctggagcttgtggaaacgctgcgcgagaagcagaaacgcggatcgctcctgtgggtgcttgacaagacgaagacggcgatgggtgccagactgctccgctcctatgtggaacagccgctgattgacaaggcggagatcgagaagcgccaggatgcaatctgtgagctgaatcagcacgtgattaccagagaggaactccgggaatacttaaatccgatctacgatctggagcgtctgattacgcgtgttacatatctgaccgccaatcccagggatctcattgccttccgcagttcgattgccatgctgccgccgatcaagagtcttttgggcgattttcagtgcgagctgctgggagaaatccgcgaggacatggatacgttggaggagctctgcgcactgatcgaccgggctatcatggaggaaccgcccatttcggtgcgggacggcggtctgatcaaggacggctacaacgaggatgtcgataaataccgcaaggcgaagacggaagggaagacctggctggcggaactggaagccaaagagcgtgaaaagacaggcatcaagaatttaaaaatcaaatataacaaggtattcggctattatctggaagtgaccaactcctacaaggatctggttccggattattttatgcgcaagcagacgctcgccaacgccgagcgctatatcacgccggaattaaaagaactggaggacatgattctcggcgcggaggacaagcttgtcacattagagtacgatctcttctgtgaggtgcggagtacgatcgctgcggaggttgtgcgcatccagcggaccgccaaggcggttgccggtctggatgtattcgtgtcgctcgcacttgtcgcggatcagaataattactgccgtccgaaaatcaacgagaacggcatcattgacatcaagggcggacgtcatccggtggtcgagaagatgatcaacaacgatatgtttattgacaatgacacgtacctcgacaacggcaatcaccgcatctcgatcattacgggaccgaacatggcgggaaaatccacctatatgcgccagacggcgctgatcgttctgatggcgcagcttggcagctatgtgcctgcggcatccgcgaagatcggtatcgtggaccgcattttcacacgtgtgggagcgtcggatgatcttgccagcgggcagagtacgtttatggtggagatgaatgaggttgccaatattctgcgcaacgctacctccaactcgctgctgatcttggatgaaatcgggcgcggcacaagcacctacgacgggctgagcattgcctgggcggtggtggagcatatcagcaacccgaagctcctcggtgccaagacgctttttgccacacattatcatgaactgacagagctggaaggcaaattaaacaacgtcaacaattactgcgtggcggtaaaggaaaagggcgatgacattgtatttctccgcaaaatcgtaaagggcggcgcggacaagagttacggtatccaggtggcaaagcttgccggcgtgccggattctgtcattgcgcgtgccaaggagatcgtggaggaattaagtgccaacgacatcacggaagttgcgagaaatatctccgtcgatacgggaagcaaaaagaaaaaagaaaagctggacgaggtggatctgacgcagatgtcgttgtttgataccgtgcgggacgatgacatcatagaggaactgcggaatgtggatgtcggaaatctgacgccgattgaggctttaaacaaattatacgaacttcagaacaaggtaaagaaccgctggtaaccggaagcgcctttggcaaaggcagatgggaggaatggaatgccgcagataacactgctttcgcaggaaacaatcgataaaatagcagccggggaggtggtggaacggccgtcctcggtggtcaaggagcttgtcgagaacgcgatcgatgcccgggcaaccgccgtcacggtcgagatcaaggagggcggcacaacgttcgtgcgcattacggataacggctgcggaattgagcgtgagcaggtaccgctcgcgtttctgcgccattccaccagcaagatcaagagtgtggaagaccttttatgcatccattcgctcgggtttcgcggtgaggcgctctcaagcattgccgccgtatcgcaggtggagctgattaccaagacttacagcgatctgaccggaacgcgctatgtcattgaaggctcaagggagatgagcaacgatgagatcggcgcgccggacggcacgaccttcatcgtcagaaacctcttttacaatacgccggcacggaaaaagtttttaaaaaccgcgcagacggagggaaattatatcagtgacctgatggagcgccttgccttgtcccatccggatgtctcttttaagtttatcagcaacggacagaccaagatgcatacctccggcaactccaatgaaaaagatctgatctatcatatctacgggcgcgatattacggcggcgcttcttccggtctgcgcagagacagaatatttctcggtaaagggctttgtcggaaaaccgatgatttcccgcggaaaccgcagctacgaaagctattttatcaatggacgctacatcaaaagcgcactgctctccaaagcggtggaagaggcgtacaagggctttatgatgcagcatcagtatccgttctgcgtgctgtattttaccatggatacggagcttttggacgtcaatgtgcacccgaccaagatggagcttcgtttttccaacaatgaggaagtgtaccggaagctatatcagacgatccgcgatgtgctgactcacaaggaatttattccggctgtcccggtggaggaaaagaaagaagaaaagcggccagccattaccggtagcctgccggagccatttgagacaaaacgtctgcatatcccgccgcagacacaggtgctgccgcaggggcagaacgtgacgccggaaccagtcagaacaccggaaaatctggacgtgttccggcaacttctggtgcgggaagagagcagctatcatacggattccgcatctgcgggttctgcttcgaccgaagatggcagccggatgcaggagatgccacgggaagcggaaagcataccggcggcggataccgggcagccggcaaaaccggttgacgaacagccggatgtgcggccggagccgattcctaaggcagaggtcgtgcagggaactcctgatacaccggagaatctgaatacgccggagaatctgaatatgccggagacagacacacagaacgtgcaggagacgcagaatccgcaggagacagcggacacggtcgtgtacgagcagcagacgctcgaggcggcggacaccggatttttcacgccggatgcagccagacggcaccggatcatcggcgaagtgtttgacacctactggctgattgaatacgaggataagctgttcattatcgaccagcatgccgctcatgaaaaagtgctctatgagcgcaccatggcgcgcgtccgcacacagaattttgcctcgcagaccttaagcccgccgctcattctgacgttgagcgccgaggaacaggaaatgcttacacgctacggggagcagatccgtctgttcggttatgaggtggagccgttcggcggcaaggaatttgccatcacggcgattccagccgattttgaggcggtcgatatgaaaggcatgttcctggacatgctggacgattttaccaacataagcggcagggaagcaccggaactgatcttggagaaggtggcttccatgtcctgcaaggcggcgatcaagggaggcgattccatcagcagggcggaggcagaacagctgatcgacgagctgctgtccttggagaatccctaccattgtccgcacgggcggccgaccattatctccatgagcaaatatgagattgaaaagaagtttaagaggattgtatgacaatgaaaccaaatcccatggtaattctgaccggcccgacagcggtcgggaagacagcgctttccattgcactggcgaaaaaaataaacggagccattatatctgcggattccatgcaggtgtataaatacatggatatcggctcggcaaaaatcatgccggaggagatggacggcgtccggcattatcttgtggacgaactggaaccgtccgatgagttccatgtcgtccgttttgtggagatggcaaagcgggcattaaaagagattacggcaaatgggcagatccccattgtggtgggtggaaccggattctatattcaggcgctgctctacgatattgattttacggagcaggagtgtgacagtgcataccgcaggcagctggaagagctggccgagacacgcgggaatcattatcttcacgaaatgctaaaggcggtagatccggcatccgcagaggcgattcacgagaataaccgcaagcgcgtcatccgcgccctggaattttaccatgagtccggcgagcggatctccgagcataacgagcgggagagccagaagacatccccctacaattttgcgtattttgtcttaaatgacgaccgcgaaaagctttaccgccgcatcgatgcgcgcgttgatgccatggtaaaggctgggcttgtcgatgaggtggcaaggctgcagcagatgggctgccatgcggatatggtgtccatgcagggacttggctataaagagatactggcgtatttaaacggcaccagcaccctggaggaagccatctatatcatcaagcgcgaatcgagacattttgccaagcggcagctgacctggttccgcagggagcgggatgtcatctggctgaacaagccggattttgagtatgacgatacaaaaatacttacatacatgatggatgtgttacaggcgaaaggaattttgccggcataaaagagaggtacagagatatgaatcagttattacaggaacaatacgagcgtctgggaatttccccggaggtaagtgcattcggggaaaaaatagaagcttccttgaagcagcgttttgaagaaatcgatgcacgcgcagaatacaaccagctaaaagtgttaaaagccatgcaggacaaccgtgtctcggcagaatgtttcaatacgacttccgggtacggctacaacgatctgggcagagacaccctggaaaaagtctatgcctcctgcttcggcggggaggatgcgctggtgcgtccgcagatcacgtgcggcacccacgcgctggcgttggctctgatgtccaatctgcggccgggcgatgaactgttatccccggtcggcaagccatacgatacgctggaggaggtcatcggcatccggccgtccaagggatcgctcgccgagtacggcattacctaccgtcaggtggatctgcttgcggacggagagtttgactatgaaggcatccgcgccgccatcaacgagcgcacgcatcttgtcaccatccagcgttccaagggatatgcgccgcgcaagacgctctctgtggagcgcatcggaaaactgatcgcattcatcaaggacatcaaaccggacgtgatctgcatggtcgacaactgctacggcgaattcgtggaagagcgtgagccgattgaggtcggggcagacatgattgtcggttccctcatcaagaatccgggcggcggacttgcaccgatcggcggctatattgtcggcaaaaaagaatgtgtggaaaatgcggcataccgtctgacttccccgggactcggcaaggaggtcggcgcttccctcggcattctgcagtcgttctaccagggactgttcctggcgccgaccgtggtgagcggcgcgttaaagggcgctatttttgcggcaaatatttatgaaaagctgggatttgacgttgtgccggacggcagtgagagccgtcacgacatcatccaggcgatttccttccacaatccggacgcactgatcgccttctgcgagggaattcaggctgcggcgcctgtggacagctacgtgacgccggaaccgtgggcgatgccgggctacgacagcgatgtcatcatggcggcaggtgcatttgtgcagggttcctccatcgaactgtctgccgacggaccaatcaaaccgccgtatgccgtgtattttcagggcggtctgacctggtaccatgcgaaactcggcattttgaaatctttacaaaaacttaaggaacgaaaacttgtgaatctggatgcgttatgctaaaatatgatgtaagtttttgtcccgtaattggttgacataaattctacaaaccatcataggaaattgccggggagagacgggaaatctttatgaatcatcattttacaacggttaaggaactgccggactcggagaagccatatgagaagtttttaatatccggggtcgaatccttaagcgatgcggagctgattgccgtcatcatacgttcagggacgcgcgggacgcgttctgtggaagtggcgcaggaattgctgcggcaggacggacacgatctgttgaatctctacacgttatctgttcaggatatgcagaagattcccggaatcggacaggtgaaggcgatccagttaaaatgcattgcagaattatccaaacggatggcgaagacgcgctataaagagcgcatctgtcttggcgatccgggctccattgcaagttattacatggaggatatgcggcatgagagcagagagcgtacgatggtgcttctctttgacgccaaatgccgcctgctggagaaggttatgatgtctgtcggtagtgcgacggctgcacttgtctcaccgcgcgagatttttctcgctgcattggacaaaagtgcgattcagattgtgctgatgcacaatcatcccagcggtgatccctccccttcggcggaggacgatgcagtgacaaagagagtggcggagtgcggagcgcttcttggtatccctcttgtggatcacattattatcggtgaccgcacgtactacagctacagagaatgcaaaagaatacaataaagggagagaacaatgacgaataacgtgtatggtattgaccttggtacctgcaatatgaagatttattgtaaggcgtccaacaagattatgaacgagaagaacaccatcgctctggtgaataagaatgagatgtatgcctacggtgatgacgcttatgcaatgtatgagaaggcgccggaaacgattcaggtgacattcccggttgtgggaggcgtgattgcggattttaataatcttcaggtaatgcttcagacttatctggagacccacgccaagggcaagctgcgcggagcggaattcattgttgctgttccaacagatattacggacgtggagaagcgtgcatttttcgacatgttctacaagagcaaattaaagccaaagagtgtgctgttatgtgagaagccgatcgcggatgccgtcggtctcggtctaaacgtcaacgagccgaccggtattatggtggtggacatcggtgcggataccacagagatttccgtcatctcgctgggcggactggtcttaagtgatctgttacattccggcggcaacaagatcgacgaatccattatcacttatgtgaagcgcaagtacaatcttgtcatcggacagaagaccgcgcagagcatgaaggagaccctcggaagcggtatcccgggcaacacccagaccatggtggttgtcggacgcgacgtggtgagtggtctgccgattgagatggagatgtcgggagctgttgtctatgaggcgatcaaggacaacctcaacacgatctgcaattccatcaaaatgatcctggagaagacgccgcctgaacttgcaagagacattattcattccggcatctatatcacgggaggaagctcccagattcatgatctggatcagctgttccgcgatattacaggaatcgagatcaatacctgcgaggagccggaggagtgtgtggtgcgcggactcttaaagatcgtatccgatgccaagtttaagcatctggcattcagtatgaagaataagatattgttatagaggaaattatgaaacggaaacccaaaattgttttgcctgccaagtacatattgctgattctgaccgttgtctgcgtggcagccatgattaccagctttacgctcaatatctccggcggtccgctcaacgcggttgccggttatgtgtttgttcccatgcagcgcgggatcaacacggtcggcgcatggattacggagaaagccgacaatcttaaaaatttaagcgatgtcatgtcggaaaacgatgcgctcaaaaagcaggtggacgagcttacctccgaactgaataccaacaatctggagcagtatgagcttgagaatctgcgcgagcttctggcgctggatcagaaatacccgagctatgagaaggtggctgccaatgtcatcggcaagagcagcgggaactggttttcctatttcacgatcgacaagggaaccgacgacggaattgaagtcgacatgaatgtgatcgccggcagcgggcttgtcggcattgtcacggacgtcggtccgaattatgccaaggtcacttccattatcaacgatacggcgcaggtcagcggtatggtgacgacaacctccgacaacctgatcgtaaacggaagtctccagaacatgaacgagaacatggtcatcgagttttccaatttgaatgacagcgacaataaggtggcggttggcgaccctgttgtcacgtcctacatttcagataaatatcagcagggaatcttaatcggctacatcagcagtctttccacggattccaacaaccttaccaaatccggcacgatcacgccggcagtggattttgagcatatcgaagaagtccttgtcattctggacaagaagcagtcagccggggagtaggattcatattatgagaagaaaagtaagtgtatttattatcattacaatctgtttcctgcttcagaccacgctgtttcagacattatctttcgcgtcgatctcgccgaatcttctgattatcgtcgtgtcgtcctttggttttatgcgcgggaaaaaagaggggctgtatatcggctttgcctgcgggcttctgcttgatatcttcggcagcggaattcttggattttatgcgctgctctatatgtatatcggctatatcaacggctgtttccgcaaaatgttttacccggaagacttaaagctgcccatgcttttgattgccggcagtgatctgggatgcaatctgttgatctactttttcttgtttttgttccgcaatcgttatcattttcaatattatctgtggaacatcatgttgccggaacttgtctacaccatgctgattacgatctttttgtatgtagttatcctgaaagtaaaccagcggcttgagacattggaaaaaaggagtgcaagtaagtttgtttgagaatataaaagaagttttccgcatgttttttaaatcgagacttgccgttgctgccgttcttatgacggtgctgttcggtgtgcttttgtggcgcgtgttctacctgcagatcgtaaagggcgagaaatatcaggacaactacaccttaaagatcgtaaaagagcggaccttgaacagtacgcgcggcaatatctacgaccgcaacggcgaactgctcgcatacaatgagctggcttattcgatcaccatcgaggacaacggcagttacagcagcaccgataagaaaaacgaatcgttaaacgccgagattgcccaggttatcactgcactggagaaaaacggcgatgcgatcaccgatgattttaagattgaccgcaccggagagggtacctacgaattcaatgtcacaggtacctcgttaaaacgtttcctggcggatgtttacggcgagagcagctacgatgatctcggcatgaacaaaaagcttggctacgacacctcccaggcgaccgtggatcaggttatggactatctccgcaacgactgttacggcatcgacgacagctacagcgacgagatggcgttcaagatcacgatcgtgcgttttgccatggcgcagaatgcctaccagaaatatatcgcaaccacgattgcgaccaacgtatccgaagaatccgtggcgtacatcagcgagcacgcacaggaactgcagggcgttgaggtgatggatgacaccatccgcaagtacaataacagcgaatattttgcctccattctcggatacaccggtaaaatttcttccgaggaatacgccaaattatccgagacggatgacagttataccaccaacgatgtcgtcggcaagggcggtattgagcagtatatggattcctacttaaagggtgaaaaaggctacgaaaagctgtatgtcgactatctcggaaaagccatcgaggtgattgaccgcaaggagtccaaggccgggaataacctgtacctgtcattggacagtgatctgcagattgcggtatacaatcttttggagcaggaaattgcgggaatcgtgtattccaatattgacaatccttcttccgatattccgatcccgatcacagatgtctactttgcgttaatcaataacaacgtcatcgatctctcacactttgacagtaccgacgcatcgacggcggagcagtcggtatccgccattttttccgcacggcaggacgtggtaaaaagccagttgagagagcagcttaccggcagcacgctgacggattttaaggatctcagcgaggaggagcaggattatttcacttatattatccggagactccgcaaaaataatattcttgccgacagcaacatcgatacctccgatgaggtctaccagcagtggcagcagggggagtgcagtccgaaagattatctgaatcacgccattgcccagaactggattgacattacccagtttacggtggatgagaaatactcggattctacggaaatatatgatgccctgtgtaattatattctggaagagcttttctatgaaaaagatttttccaagatcatttatgaatatctgattaccggcgggcagatttccgggacacagctctgtctgattctgttcgaccagggcgtgcttccgtacaacgaggaagagattgcagcgttaaacaacggctctgtgacagcggtatcgtttttaaaggaaaagatacagaatctggagatcacaccagcccagctggcattggacccgtgctcgggatcgtgtgtggtcacgaataccaagacaggagaggtgttagcgcttgtcacctacccgggatatgacagcaaccgtctggcaaacaacgtcgacaccgaatactttaacagtctgcaggatgacaaatcactcccgcagtacaattacgcgacccagcaggagaccgcaccgggatctaccttcaagatggtaacctccacggcaggtctggcggagggcagcatcacaatcggggagcgcatccgtgatctcggcgtctatgagaacgtaagcaaccatccaaaatgctggattttttcatccaacggcggaacccacggggagatcaatgtctccgaagcgcttcgtgattcctgtaactactatttctacgaggtaggataccggcttgccacgaacaattattccacggcatataacgattcgctcggcattgaaaagcttcagaaatacgcgagcctcttcggtttaaacgaacgcaccggaatcgagatcgaggaagcggcgccgcagatcgccaatgaattcccggtcatggccgctatcggacagagtaataacaactacaccacggtacagcttgccagatatgtgacagccgtcgccaatgagggaaccgtctaccagtatacactgttgaaccgcctggaggattccgacggaaatgtgttacagacatttgagccgcaggtgcgcaatcagatcgacgtgcttgatacggaagagtggaatgccatccattccggtatgcgcatggtggtggagaatacaaaagagtttgacggttttccgatcgaggcagccggaaaaaccggtacggcacagcagaatttaaagcggccgaaccacgcattatttgtgggatatgcgccttacgacgatccggaaatctccatcgcgacgcgtatcgcatacggttatacctctcacaatgcggcgaagctcgcccggaatgtatttgcctactactttaatgtcgagaatgaagatgaactgttaaacggtcaggctgcaaacggcaattcttcatccaacgagatcagtgattaagagagaaaggcgcagacaatgagtcaggcagtcattatcaaaagcagtaaaaacggaatcaatctggtgctggatgcatcgatgccgtttccggaactgctcacagaaattcttcacaaatttacggaggcggagcgctttttcgcgaacgcatcgtttgccatctcttttgagggcagagaattaagcgatgaagaaaaataccagatcgtagacgccatcatggaacagaccagagtcaaaatcctgtgtattttagacagtgatgagatccgtgatgcggtgatcgaacagaaatgccgcgagatgcagcagacaaacgaagagaaagaggcgagaagacagagccgcggctgcttttaccgtggctcccttctgccgggagagcgccttgagaccgaggagagcatcgtcatcatcggcgatgtcccgcaggaagcggtggtggtatcccaatcggatatcgtggtgctcggcgaactctcgggaagcgcctttgccggaatgagcggcaataccaatgccacgatcacggcgctttctttcctgcccgagcagtataacattgccggcgtttacggcagtccgatggaaaaagcaaaaaattccatcttttccaagcgtaataagaccacacaggcgaaaatggctttcctctgtgacggtattattaatataaggtctttctcgtaaagactataaaaacaggaggtcttccatgggtgaagtaattacatttacctcaggaaaaggcggcgttggcaagacgactacaacagctaacgtcggtgcgggactttcactgttagataaaaaggtggtattggtagacaccgatatcggcttaaggaacctcgatgtagtcatgggactggaaaaccggatcctctataatctggtcgacgtcctgaccgggagatgccgcgttaagcaggcgctgatccgggacaagcggtatccgaatctccggatcataccgtcttcgtgctccggtgactccaaaaacaatctgaatgaaaaacaaatgaaaaatctgctgtcggacctgcgaaaagaatttgattacgttctgattgacagtccggcgggaattgacggcggttttaagctggcgacggcggattccgaccgcattattgtggtcacaacgccgcagattgcggcgattcacgatgcggactgtgtaatccagcttctgcaccggaaaaaggtgccccggatcgatctgctggtcaacggttaccgcagacagatggtgcgtgacggcaacatgctcgatattccggatatctgtgagcttctggaagcggagcttctgggtgttgttctggaagacgaggagattatcatcagccagaaccacggggaaccggtgatcgggaagcatacggtttccgacacctgttaccagaatattgcacgccggattgccggcatggaagtcgcaataccggattatcttcatcacaaagggatgttctccagattcttctggcggaatcatgccggaaagctggtgtaggatgtgtcatagaagcaagggtgttgcaaaagagcggctgaagctgatgatcgacagccgcaggaaacagctggatgacgagaccatggcgcagatccgccacgaaattggcgaaatcgttaccagatatgtcgatattgaacccgaaaacgttgaaattaaaatcatacttaaggattacatatgttcaaacaatacaaactaaagaattacaagttcatattgattgcactggtggtgatcttaaataccatcggtgtggcgctggtgggaagtgcaagcccgggcgaccagaaaaagcagatcatcggtatggtatccgggatcatcattatgcttctggtatcctatattgattataattttatactgcgtttttcctggctgatctatctgggcgccgtcggtcttctggggcttgtcattgtggcaggagagcagagcaagggggcgcagcgctggtttaagatcggcggatttcagttccagccgtccgaactggttaagattctgatgatcctttttctggcttactattttatgcggcacgaggaaaaaataaattccccgcgggtgctgttcggatcttttgtgctgatcggcattccgcttgcccttattctggcgcagcccaatctttccacgaccatcgttctggctctcgtttttgcggcaatgctgtttgccgctgggctcagttataagatcgtggtgggcgtgctggccgtgtgcgttccgaccttttttatcgtattgacgttaatcattcaggataagtttccgtttatacacagctatcagctcggacgtattatgggatggctttatccggataaatatccggatattgcctaccagcagcagaactctatcatggcgatcggttccggccttttgtggggaaaaggactcggcaataccgatcctacctccgtaaaaaacggcaagtttatactagagccgcagaacgactttattttcgccgtagcgggggaagaaatgggctttgtgggaacggtcaccattataattctcttgcttttcattacgattgagtgtatatttattgctagaaaagcaaaagatgcggcgggcagactgatctgctgcggcatggcggcattgattggatttcagagtatcgtcaatatctgtgtagcgacgggattactgccgaataccggtgttacgctcccgtttgtcagctatgggcttacgtcgctatggtcattatatatcggtatagggcttgttcttaatgtaggtctgcagccgaaaaaatattaacaggggggacttaaattatgaacatcggattgattgcacatgactcaaagaaaaaactcatgcagaatttctgcattgcttatcgtggaattttatgtaaaaacgaactttatgcaacaggaacgacagggagactgatcgaggaggtcaccaacttaaacgtccacaaatatctggctggacatttaggcggcgtacagcagctcggagcacagatcgaacacaatgagatcgaccttgtgatctttctgcgcgatcccctgactccgaagtcccatgagccggatgtcaatacggttgtgcgcatctgtgatacccacaatattccgcttgcaaccaatctggcaacggccgagttgttaatcaaatcactggacagaggagacttagagtggcgtgaaatgtataaataaatggatctgtctgtcccttctgattgccgtttcctgcgtcagcggatgcggtaagacgtcagctgccatcgaacagccctatgacgtgtatgcaaccgcagcggatttcgggttgtcctcgaatggcaccgcagaggcaaagtcttattttgcgagtgatctctgcgtttcggaagatgtggcgatcggaacggattccacggattcccaggtggcagagggcgcaggcacgtttaatcttgagacaaataccgtagtgtatgccaagaatctgtatgagcggctctatcccgccagcaccacaaagattctgacggcgtacattgccttaaaatattgtgatgatctggacgctatggtgacggtcagcgagaacgccgtcaatcaggcatccgactcttccgtctgcaatttaaaagccggcgacgtgatccggcttcgggatttactatacggtctgatgctgcgcagcgggaacgacgccgcagttgccattgcggaatacatatcgggagatgtcgattcgtttgcggctctgatgaatcaggaggcggcagcaatgggggcgacaaggtcccattttgtcaatccgaacggccttccggatgagaaccattacacctgtgtctatgatatgtatctgattttttccaatgcgatcaaaaacgatacctttgtatccatcatcggcacaacctcctacgatgttacctataccgacgcttccggcgaggcagtgacccatacgtgggagaacaccaatcagtatctgaccgggaatgcaaccacaccggacggatttcagattgtgggcggcaagaccggaaccacgggcgaggcggggtactgcctggtactgtattcgtataatccatccggccagccgatcatatcgatcgtattcaaagcggacggtaagtccaatctctatcttttaatgaacgaaatgctgcagggattcgccatttagacggtggatccctgattgtatatatttatttgaaaattggttgtattttatgtgcatatagactataatcaatttataaaatcaactgcttttatacatattaacggattttgtgtagaaagcagcatcagcaggaggaaatgactatgatagagattatttcaggcgaaaagggaaaagggaagacaaaagagcttttgaccaaggtaaatgctgcggttgcctctgcatccggaagcattgtataccttgataagagtcagaagcatatgtacgaactcagcaacaagattcgtctcatcaatgttaccgattatccgatcgataattgtgatgagttcctcggatttatctgtggtattgtttcacaggatcatgatctggaagaaatgtatctggacagctttcttacgatcgcttccgtagagacggatgacgagatctgtcatgcaattcagaaactggatatcatcagtgaaaaatacaacgtaaaatttgttttaagcgtctccaggaacgaggcatctcttccggactgcgccaaagcaaaaattgtcatttccttataaaatgtaaaatgccgtaagaaaagtgctgtagtgatacagcactttttctttgccggcagggacttcttatgcctgatcgacagagcggatgcgcccgaacaggctgatcagatagagaccgccgagtccgacaagcgcatagatgatccgggagaaccatgacatattgccaaaaataaaggcaacgaggtcaaaacggaaaaatccgatcagtccccagttaatggctccgataatcaccagcgtaagcagtgtataatccaaccaatttgtattcattttctatgcctcctttttctatcatagtatggacatgctgcgccggttttattctgctttgccggacttgttgttcactccgggaacaaatcccgaatttattgccgctaaaaagttgttttccggggctgaaaatggtagaataaaaatgttgaatttgaaaaaaggtggggcattttttgagtaaaaataaaaaagtggttcgctatcgcaagccgtttaatgtcaatatcggaatgatcatttttattattatttttatctatctgatatttaacattttctcctacatgacgacggagcatatttccacgtatgaagtagagcagggcacgatggcagaaaataatatataccgcggactgattctccgccaggagcaggtctattcctcggatacggcgggagcgctgaatgtatatgtaaaggaagcttcccgggtgggttacggaaatctgatctgctccgtcgatgaaggtggcagtgtgtccaagaaaatcgatgaagcagccggcaacgcttccaatctgagtgcgcatgatctctcggagattgaggattccataagcgaatttcagacttcctacagcgcccagaatttttataacgtttccacgtttaaggaagatcttgactctgcactgaatgaatccttgagccttgccgcgctggacggaatctctgattacgccgcggcggcgcaggcagaaaatacatttcacacctatcatgccgatcagcccggcattgtcgtctattccaccgacgggtatgagggcgttaccacggatacgtttcagtcgtccatgtttgacgaggcatcctacgaccgcacggacggtcagcgggcactgcaggttgcggcaggagcccctttatataagctgattacaagtgaatactggtcgcttgtcattccaatcggctccgatctggcaaagcggctggcggacgatgataccttgcagctgcgttttatgaaggataacaccacgacctatgcgacctataccatcacggaaaaggaaggttccacctatctgattctgacgcttcgctcggggatggtgcgctatgccaaggatcgctatgccgaggtggagctgctgcttagtgaggagaccggacttaagatccccaattccgccatcacggagaaggaattctataccgttcccaaggatttcttcatgaaaggcggcgattccggcagtctgggcattctggtgcagaggagcgattcctccgggaaagcaggggcggagttcattgccccgaccatctactatgagacggataccgattattacatcgacggtgaggaggttggcgcttcggatatcatccgaaaggcggattctacggagacgtaccagatcggttccggcacggcgcgcctgcagggcgtttataatatcaataagggatatgccatcttcaaacagatcgacattctctatcagaatgaggaatacgccatcgtgcggaccgggacaacctacggaattgcgctctatgaccatatagcactcgacggaagtaagattcacgaaaatgatctgatcaattaaacggaggaaatagatatgttaaaggaaaatttaaaaacagtggaagagcatgtacaggaggcttgtaagcgtgcaggacgttcccgcgaggaagtgacgttgatcgctgtcagcaaaacaaaacctttggaaatgctgcaggaaatctacggggagggcgtccgcgatttcggagaaaataaagtgcaggaactgtgcgataaaatggagcagctcccgtccgacatccgctggcacatgatcggccatctgcagcgcaacaaggtcaaatatattgtcggaaaggttgccctgattcattcggttgatacataccggctggcagaagagatcaatatccaggcaaagaaacgcggcatcatcgtgccgattctggtggaagttaatatcgccggcgaggagaccaaattcggcacaacggcagaagatgccatgttgcttgtggaagagatttccaaactggaaaatgtgcggatcaggggacttatgacgattgcgccgttcgttgaaaatccggaggataaccgcctttattttcggaaaataaagcaattatctgttgacataacaaataaaaacatagataatgtatctatggaaattctgtctatgggtatgacaggagattacgaggttgccattgaagaaggagcgacgatggtgcgtgtcggaaccggaattttcggtgcacgcaattacaaaaaaagcaatgaatcgcattaggagtataacatgagtgttttagataaatttttaaatgtcatgcgtcttaatccggacgatgacgacgatttttacaatgaagattatgattacgatgatgattatgaagaggatgaaccggtaaaatcgaagagttctttccgcaaggacaagaggaaggcggaggaggatgattatgaagaagatcattctatccacgagaaagccgtcaagagttctccgaaggtcacaccgattcgcccggtcaagaagcagggaggaagcggcatggaagtatgtgtcatcaaaccaacctcagtggaagatgccagagagattacagagacgcttctcaataaccgcacggtcgtattgaacgttgagggactggacgtcgagatcgcacagcggattatcgattttacatcgggttcctgctttgcaatcagcggtaatcttcagaagatctccaactatatctttatcattacaccggcatcggttgacatttccggcgatttcttaagtctggtagacacgttccagtcgacacgcagtgtccagaccgatttttagagtctatgaacgaacaggatctttgtcagaagcgtctgcttgatctctccagacaggcggatcgcaagggaatcgttctattcagcgatttcctcaatttaaatgaattgaatatataccaccagtccgagaagctgtttgcgacgaggaccgaatgttttggcggtattccatgtgcagagcgtcagatgattgcctttcttcctgatgctctttattatgattgggaatatcccatttccgccttaaaaattaccccggcttatcccaaatttgccgagaagcttggacatcgggacatcctcggatcgctgatgcagcttggcattgaccgctgcaaattaggcgatattctggtaggggagcaggaagcctatctgctgtgtgaggagaccgttgcggactattttgcggagcatcttgaaaagatacgccacaccctcgtgaaagtcgagccgtgcagcctgtgtgatcttaagatcacacaggaattccagtcacaggacgggatcgtaacctcagaccggattgacgccgtcatcgcgtgcgtttatcatctgtcccgcagtcaggcatcgcttttgctgcgccaggagaaggtttttgtcagcggaaagctgatgcagaatccatcctatacctgccatgcggatgatattatttctgtccgcggttacggacgctttatctaccgcggggaatacgggacgaccggaaagggacggctcaaaatacattacgacctctatgcaaactgaaaggagtttttcatggcaaaatcgattccggtaaaagcaaacgacagtatcatttatcatattgaactggttcatgatttttcaatgctccctgcgtttctgcagggacttggctacgggcacagtcagaaaatctgcattgtgaccgattccaacgttgcgcctttgtatgcgagggacgtacaggatctgttggaaaaagagtttgacacggtcattcttcatacgtttgaggcaggagagcacaataaaaatctggagacggtgaactctttgtaccagacgctgatcgagcagcattttgaccgtcaggatctgcttgtcgctttaggcggcggcgttgtcggcgatcttaccggttttgcggcggcgacctacctgcgcggcattgattttatccaggtgccgaccacgctgctttcccaggtagacagcagcatcggcgggaagaccggcgtggactttatgcagtacaaaaatatggtgggtgctttttatcagcccaaactggtctatatgaacctgtccgttctgcaatcccttccttccaggcagatcatttccgggatgggagagattataaagcacggtcttatcaaagatgccgcttactatgaatggctgatggcacatcatgatgccattttggcactggagccggctgtcatggaagagatgatcgcacgaagctgtgagatcaagcgcgaagttgtagagcacgacccgacggagaagggagagcgcgcactgttaaactttggtcataccatcgggcacgccattgagaagttatgcggtttttccctgtaccatggggaatgtgtggggcttggaatccttgctgcggcttatctttctaaaaagcagggaaatctgaccgaggagcagcttgccggtatcaggcagtgcctgtctgcctttggatttcagacacagatcgatggaatctcaacggatgctgtgctttctgccaccaaatccgataagaaaatggtcggaaaccaggtcaaatttattctgctgcataccatcggagatgcctatatttaccgcgagttaagcgacgcgcagattctggacggcattcgttatgtatgccgggcgtaatcccggtctggcagggaaaacaacatggaaggacaatctatctatgaaagatcattcacctattttgaaacgcaatctgaccggctgtgtggctgcagtgctcctcattctgttcgatcagtttaccaaaatgcttgcggtagcccatttgaagaatcagccgtccaacgtactcatagacggcgtgtttgagctgcgctatctggagaaccgtggctccgcattcggaatgatgcagaataagctgataattctaattcccgttaccgtcgtggtgacgctgcttattctgtatctttttttcaaaaaacttcccgccacgagacactttttctggctcaatgcggttgccgtactgttttttgcgggagccatcgggaatttcatcgaccgcgtcagacagggctatgtggtagattttttctatttcagcctgatcaattttccgatctttaatgttgcggatatttatgtgacagcagcggcatttttattgatctttttatgtctgttctattacaaagaagaagattttgaacagattttcccatcgggttcttccagacaacattcttcggagaaaaaagacaatgactagagaaacatttgaagcgggaattgcatatgagggagagcggctggacaagtatctgaatctcattttcagcgagacagatgcggcgcagtcgcgctccttttttcaaaaactgatcaaagaggggcatgtgcttgtcaatgatacggcgcagaaagccaactaccggttaaaggcagatgatatgatctgcgttgagattccggatgcggtacagacgccgattcttccggaaaatattccgcttgacattctctacgaggatgacgatcttttagtcgtcaacaagccgaagggaatggtcgtccacccgtccgcaggacattataccggcacgcttgtcaatgccatcatgtatcactgcagggacagtttgtccggcatcaacggggagatccgcccgggcatcgtacaccgcatcgatatggacacaacgggttcactgattgtctgcaaaaatgatgagagccatgtctttattgcggagcagatcaaggaacattccgtgaaccggcgctaccgcggcattgtatacggtgtagtgaaagaggaggagggtaccgtcaatgcgccgatcggacgccatccaatcgagcgcaagaaaatggcaatcaatgagaaaaacggcaagcctgccatcacccattacaaggttctggaacgctttgagcggtacacatacatggagtttaaactggagaccgggcgcacccaccagatccgtgtgcacatggctagcattggtcatccgctgcttggcgacacgctgtattccagcggaagaagtccctataagctgcaggggcagacgcttcatgccatgacgatcggcttcattcatccgagaaccagagagtacatggaggttacagcgcctcttccagaatattttgaaaaaattctgaaagatttgcgataatttcaaaaaataattccgtttttcaaaaaaatgtattataatatattcatagaatgttaggaaaggcgggatcttttatgggcaacaaaatctataccattggtcgtgaatttggcagcgggggaagagaaatcggcgaaaagcttgcggaacgtcttggaattaagctctacgacaaagaattgttacagcaggcggcaaaggaaagcggtttctgcgaggagattttcgagaatcatgatgagaaaccgaccagcagctttttgtattccctggtcatggatacatattcgctgaacggctatcattcggcaccgtttctcgatatgcctttaaaccacaaagtgttcctggcgcagtttgataccatcaaaaagattgcagagcgggaatcctgcgtgattgttggaagatgcgccgattacgcattatcggacaatccggactgcatcaatatctttattcatgcggacatggacaaacgcgttaagattatcagccaacgcgccaatattacggaaagcaaagccagggatctgatccagaaacaggataagcagcgtgcaagttattataactattatacaagcaaaaaatggggcgattcccagagctatcatctgacactggactccggtaaactgggaattgacggttgtattgatatgatcttaaagttccgtgaaatcctcgatgcatccagataacatcatcggctaatatcatacaacgtgaacgaaatggtttcaaatggtttcaaagaggcggcacttatttgatttaaggtgccgcctctttatgtctgcgcaaacaaacaccggcaaaatgcaggaaaaacgcacatattccttgaaatgcgggcggcggtgtgctatagtagagatacggatatttattcgcaaaacacaagtttaacgaatagtttctaccataaagctgttttacgctgtgccggatgttttacgggttctgttttaacagatctcttcggaatccagcagaatggtaaacgggccgtcatttaacagagagatcttcatatccgcaccgaaaataccgcagccggtatctggaatctgttctttgcaccgtgcgacaatataatcatacatccggctcgccatttcgggcttcccggcacggacaaaggaaggacggtttcctttgcggcagtccgcatataaggtaaactgcgagatcagcaaaagacttccgccgacgtccgccaacgatagatttgtttttccgtccgcatcctcaaaaatacgaagccccaacagctttttgatcattttatcggcgattgcagtcgtatcggtatcggcaattccgatcagaaccagaaatcctttttgaattgcgccggtgacattgccgtctaccgtgcaggatgcctcggttacacgctgtattacaaatttcattttatcaatctcctttttgaattatttgcttcgttgatcctaaatttcatttcatgatagatcatttcatgacagataattttattataaaatagttacgaggtgatatgcaatctatggaattaaaaaaacttttaagctatacacgccaggcggttgacgattataaactcattgaggagggcgatcatattgcggtcggtatttccggcggcaaggactctctcactctcctctacgcgcttgccggactcagacgcttttatccgaagaaattcacactcacggcaatcaccgtcgatctgggatatgattcttttgatcttactcccataaatcagctctgcgaggaacttaaggtaccgtaccacattgtaaaaacagagattgcacgtatcctgtttcacggcgacagcgtgtcggacaaagcagtcaagggatctccgtgtgcgctgtgcgccaaaatgcgcaagggagcactcaatgaggcggctctggaattaggatgcaataaggttgcctacgcacatcacatggatgatgtgattgagacggcgtttctttccatgatttttgagggaagattctatgcgtttccaccgagcacacatttagaccgcacacagcttgtggtcatacgccccttactatacgtctctgaagcggaagtaaaaggatttcggaataagatgaagcttccggtcgtcgccaatccatgttctgcagacgggcacacacagcgtgcttacgtgaaaaatctgatccgacagatcaatctggatcatcccggagccaaaaaacagctttttcatgcagtattacatggaaatatccccggatggcagacagacgtcgctgaggaaaaggagaattcaattcgtttatgaaagaaaaagcatattatgaaaatgtgaatgtaaaaaatgaagtaaaattgcgcaagcttctggaacagcttccggatttctgcaaacagtttttcattggcattgagccaaccacttcctcgcgtaccagaatcgcgtatgcttacgatatcggctgtttttttgactatctctgcgatgtgaatcccatttgccagaactataccgtaaaggatattccgctctcgcttttagacgagctcacgcctatggatatcgaggaatatctctcctatctgaagtattacgaaaaaaacggtgtagagcacacgaacgacgagcgcggtatcaagcgaaagctggcctctctccgctccttttaccgctactatttcaaaaacgacctgataaaaaatgatccggctgtgaaagtggacatgcccaagattcacgacaaaaatattatccggctggatatcgatgaggtcgcgagactgttagacgaagtcgaatccggtgaaagtctgactccacgccagcaaaaatatcacgaccgcacaaagacaagagatctcgcccttatgacgctgctcctcggaaccggaatccgtgtctcggaatgtgtcggactcgatctggaagacgtggatatgcgcaataacggcatcaagattcaccgaaaaggcggcgcagaggttgttgtatactttggggaagaagtacgcgaagcacttctcgcttatatggttgagcgccagaaaataaccgccgaagacggcagtatcaacgccctctttctctccttgcagaaccggagaatcagcgtgcgttcggtcgaaaatctggtcaaaaaatatgcaaaactggtgaccagcttaaagcatattacaccgcacaaactgcgcagtacctacggcacctccctctatcgcgagacgggggatatctatctggtcgcggatgtactcggccataaggacgtcaacacgacgcggaagcattacgctgccatcgacgatgatcgacgacgcagcgcagccaaatatgtaaagctccgtgatgtctagtgttccccggagatgcatccatcgccttaagtcctatcagatccgtggctctggcaagactctgacaaacaaaaagctgtttataaaaaaagcagctcacaaagaagctccagtcatccgaccggagcttctgctggcttaagaacttcatctaacttttcctggatacgtaccttcaccagatccgcaatctcatgcgttttgagaccgccatattcatcgtataaaataggtttcagataatgtacctgcgtggtgaccggtcccaaacaaaagctgttaaaaactttataagaatcaatcagagccaccggtacgatcggtgcctttgtctttaacgcaatcttaaaactgccggctttaaaatcacacacatggttcttattgttaaattcgtatccgccctccggaaacagaatataacgctttccctgctttacttcctcggatacctcattgatgatcgtcaatgcctgtctaacatccttcttatccagccgctttccctgaagcagatccacaaattcacgaaccagtatggtattggacttcgccttatccatcacaagagaacatggctccctgtgggtgtagataatgccgagtgcgtcgtactttccctgatgattcggatacatcatgtagccgccttctgtcggaagcagctctgtgccgtaagattttgtgtggatgccgccggttaccttcatcaggcgaatcacatggcgcgccagcgcgtagcgctcctctacactatacttttcaggatgatccgcctccctgcgcatcttcggtatcatataaggcgctctgaaaagattcattaaaatgacatagataaactttatcatacgagataactcatcctccgtaattcatattctctgtgctgccttcccgcacaatatgagctcgtcagaattcattataccgtacttacccaaaaaacacaaccgaccggagacgctgcacaaaaaataccatcttacttgagatgttctgccgaataatacgggatggtcagatactgtccggaatgaatgtcccccggcaggatgtgattgatcgcacagatctcctccatatattcgtccatgctgtcgtaatcgtctgtgatatattcatctgcgatattccagagggtatctcccttctggatctggatgcttgtgtaatatttataagaaggttccgcaggagccgcctgtgtgcggatcgttcccagcaggacagaaccgatcacaatgacggttaaaaccatcaatcccaacatgaatgtgcgtctctgcgcctttaccgctgctcttctgcttctcataagaatacctcctgtcatgttaatcgaacgttcattccgaacgtttgttgcgaacgtttgtttatgttcctatcataataccagaacatccgtttgtcaacaagaaaatcgaacaaattttcggaatatatgtttgcatttttacgcatgctgtgttaaactaaattatacataatagcattggtaatgattgacaggaggtatatgcatggcatacggcaagatcagcacgaagcagagagagattcttgaatacattaaacaggagatattgaataagggatatccgcccgctgtgcgtgagatctgcgaggcagttgacttgaagtctacctcctccgtccactcccatctggagacacttgagaagaacggatacatccgccgcgacccaacgaaaccgcgtgcgatcgagatcattgatgataactttaacctcaccagacgcgaggttgtcaatgtcccgattctcgggaatgtggctgccggtcagccgttactcgcagtcgagaacattgagacctactttccgattccgaccgaatttctcccgaacgcagagacgttcatgttgagggtaaagggcgaaagcatgattaacgtcggcatcttcgacggagacaatgttttagttgagaagcagtcgaccgcgcgcaacggcgagatggtcgtcgcgctggtggaggattccgctactgttaagaccttttataaggaggacggttatatccgccttcagccggagaatgacacgatggatccgatcattgttccagattgccagattctcggaaaggtcattggtattttccgttttctttcctgatgaagttcggtattcctggaataaaatgcagattcctattataatgtacaagaaagaatcctgcttttcaggattctccgcctgcggcgagttgctctagcgacatcgcgcgagtgcacatccctgcggagcttttctatgtaacaggaacgaagtttcctattatatagaaaaaagtatgccccctttcctgtcaaccagaagggaggcatactctttttacgacactcttaagttcaaaaacacgcatctatgacctttccgtctctccggaatcttacggatcgccgcatctatgacctttccatttctccggaatcttacagatcagccacatctacgatctttccgtctctccagatacgctccagatcatagaataaacgatcttccttggaaaaaatatggacaatgatgtcaccgtaatccatgagaatccaggtagaactggaatttccctcgatctgtttggtcttaagtcccgctttgtataatgcctcttcgcaggcatcacgcattgcctgaatctgattctgattcgttccgtccgcaatcacaaaataatctgcaaccggtgaaatctcacggatatcaatgatcttaacatcctccgccttgcggtcttccaaagccgctactgctattttacaatattcctgtgatgtcattgcatgtttcctttctatctgttctttgttcgttttaacaggtaatccgtcaaaccggatctgtctgttccttctgatactgccggtagaattcataggcaagctgtgtggagggatctaacggtccgccgaccctggagcggtatttcaatgtgtcgcagagaatctccgccatacaggcatccagatcttcaaatgccagtttccgcaccctcggcagatctgcggccttgttccttcccggctcgatataatccgcaatatagatgatcttatcgagcgtactcatatccggcgcgccggttgtgtgcatcttgatggcgtgcaggatctcaggatcttttacttcatagaccgtctctgccagataagctcccagcttggcatgcagcagaaacgggctctcatattctacggcattgatgggaatgtcatgttcctcacagatctgaagcttctcatcgtccggaatacatttggcacaatcgtggagcagacctgcgagcatcgcctgctcgatcgatgtctcataagccatcgccatacatccggcggtatacatgacacctttcgtgtgctcataccgtcccttatccaactctttttttaatcgtttacgaatctcatgctgttccatttttattctcccaaattcgatacgccgtacagatgatagcgtttgatcagctcccacacctcgcccgggagcatggcgggacattcacctgtcatgcggatctgtgcgcggattgccgtcgaggagacatcggtccgtccgcccgcaagcggatagatctcagccggaaacaacgccttgatgcgccgtatttttccctcaatctgcggcagttctaaggtatccctgaccgctgcaagcacggtggcattctgacagatgatctccggatgcctccacttgtcaaagtagtccagggaatcggctcccatgataaagaagaattgatcctccgggaactgttcctttagatgctgcagcgtcttatacgtataacttgtcccggaagactctatttctatacgtgaaagcttaaatgacgcatcatttttgatggccgcctgcgtcatttccgcgcgcacctgcgcgggtgtcatctccgcctcctccttattcggagagtgccctgccggtatgaaccacacctcgtccaacgcgaactcccggtaggcgctccttgcaatattcagatgtccctgatgaatcggatcaaacgagccgcctaaaattccgatctttctcatgccggaagttcaaacttgctgtttttcttcgcctggcggaataagatgatcttcttgccgatgacttttacaacagcagaatgtgtgcgctctgcgatgacctgtgcaatctcccgcggatcatccgcacaattctttaatacggaaatcttaatcagttcccgtttctctaatgcttcatccagcgcctggataatctccggtgtcaagcttgccttgccgatctgaaagattggatctaaggtgcttgcacatccgccgagataggcgcgctgcttacttgtcaattccatatcctgcttcctcctctttacttataataatcaaattcaaaaccgtacatgcgcacggtatcgccgtcctcaattccctgtgcctccaggtcttttaaaatgccctgctccttcatgaacttctggaagaaaaggaatcccttctcggaatccatattcgtatagccaagcatcttctcgatcttcggtccttccacaacgaatgcaccatcgtcagccaccgtaatcgtgtatggctcatccttaaagaaacggagtgccggatcgaattcaggctcatagacaaccggctccttgctgcactggtcgagaagctcgctcacgcagtacaacagttcctttaatcccttgccgcttacggcagaaatcgggaacacacggattccgtctttttcaaaggtgtcttttaacttctggataatctcattctcgtccccgtagaccgcatccattttatttgccgcgatgacctgcggcttttttaacagtgccggatcgtaagcttccagctccttgttgatcgcgataatatctgccacaggatcacgtccctcggtgccggcagcgtccaccatgtggatcattaccttcgtgcgctcgatatggcgcagaaattcaagtccaagtccaacaccctcggaagcgccctcaatcagtccaggaatgtcagcaatgacgaaacccttcgcgccgtctaaatccaccacgccaagattgggctgcagcgttgtaaaatgatagttggcaattttcggctgtgcgttggtcacgcgcgataacagcgtggatttcccgacattcgggaagccgaccagacctacgtccgcgattacttttaattccagcttgacttcaatctcgatcgaatctccgcccggctgcgcatattttggtgcctgcatcgtcgatgtcgcgtaatgctggttgccaagtccgcctctgccgccccgcagaatgacctgtctgcggttctctccggacatatcggcgatgaccttgccggactctgcatccttgatcacggttccctccggcacctttaagatgagatcctcaccgtttttgccgtggcagttgcgcttgccgccctcttctccgggctgtgccgcaaactttctgcgatgacggtaatccgtcagagtgtttaaaccttcatccaccacaaagatcacgtcgccgcccttgccgccgtcgccgccgtcaggaccgccatccggcacatatttttcacggcggaagctcacatgcccgtcgccgcctttccctgattttatgataattgttgctctgtctgcaaacattatattctacctcaattcaacttcaggcagcagatgctgccacctaccgaacggttacaaatccagatacaagaagacccggctatagacgcctgccatcaggtaagcgctgcatagtcgggtctacactctgcatcttattactcagctactggataaacagaagcctgcttcttgtcttttccttttctctcgaatcttaagataccatctgtcagtgcgaataatgtatcatcaccgccgatgcctacattaacgcccggatgaatctttgttccgcgctgtctgtataaaatgttgccagccttcacgaactgtccgtctgctctcttagcgcctaatctcttagactcagagtcacggccgttctttgtagaaccaactccctttttatgagcgaaaaactgaaggttcatattcatcatgttctacacctccctaaaattcagaatgatataatcattcccataagtattctgtattccctgcaggccaagtaccagcgactgcatcagcaatccggcatcgtgaccggccggtgaagtaaatcgcaggcgaatctcgccattgtcttcgtcggcatccgtctcgcatggttcgtcggtaaacagcccgatggaattgatcgtattgataaccagtgcagaaattcccgcacatacaatatcctcgccttcatcggcatacccggcatgtcccaggcagtcgaagcccaaatactcaccgtcatgattgcggaaaatcgttatctttgtcataacaaccttccaggattaagcgttgatcttctcgatcttaacctgtgtaaacgcctgtctgtgaccgttcttcttgtgatagccggtctttctcttgtacttgtaaacaataactttcttagatcttccctcttttacaacggaagcctctacagatgcgtttgctacatcagaaccaaccttaattccgttgtcggatacagctaaaacctgatcaaaagttactttctcaccagcttctttaccaagcttttcaatggtaatgatatcgccttcggatactttgtactgtttaccacctgttgctataattgcgtacatatggcacctcctattatcattactcgccagttgtggtgtcgcccgggcaatccggacggactttgagacctcactgtgcggcatactcgattataatagcatagcagtttggtttcgtcaacagattttttgacttttttgccaaaattcttgactttttcctatggatcgtgctatactctcttcgctaaaacttggtgtggacttttcaagtctgactttttttcgccacacaatgattcttttgagtcattgtgtggcgttttctgttttatcctggatacaataaacccagactattatataggaggaaataccacatgaacgaaacatttatgaaagaaaaaccgatactgccactgcttacctccatggcgcttccgatggtcatatccatgatggtaaacgcactttataatattgtagacagtctgttcgtcgccagaatcaatgagaatgccatgacagcgctgtccctcgtcttcccgattcagaattttgtcaacgcgcttgccatcggattcggcgttggtatcaatgcactgattgcctattttctcggagcaggcgacaaaaaaggcgccgaccgcgccgccacacagggacttgttctggcactcatccacggcgttgtcgtcactgtgttaagcatctccatcatgccggctttcctggacatgttcaccaacgatgtgcaggtatatcagatgggaatggagtacgcggtgatcgtatttgcgttttcgacaatcaccatggcgaatctttcctttgagaaaatcttccagtccgtgggacgcatgaaagtatccatgatcggactgctgtgcggaagtattactaatattatcttagacccgctcctgattttcggcatcggaattttcccgaggcttggtatcgccggcgcagcgattgccacagcgatcggtcagctgtgtaccctccttctttacctgacggtgtacaacaagcgcccgatcccggtcaaaatccgcaaagaataccttgcttttcataaggaaaccgaccatcgtctctactcgatcggagttcctgccatcttaaatcttgccctgccatcgctgttagtatccgtcttaaacggtattctggcagcttactcccagatctatgtggtcattctgggaatctattacaaattacagaccttcctctatcttccggcaaacggcattgtccagggcatgcgtccgctgatcggctataattacggtgccggcgagcagaagcgcgtgaaaaagatctatgagattacgcttgcgatgagtgctgtcattatggcgctcggcacaattttatgcctggtggcatcgcgcggtctgatggaactgttcaccgaaaatgccgagacgatcgcagccggaggaaccgcactgcgcatcatcagtgcaggctttatcatctcctccgtgtccgtcacagcctccggcgccttggaggggcttggaaaaggaacgcagtcccttgtcatatcgctgttccgctatgtaattctcatgatcccggcagcctttgtattgtgccgtatctttggaccaaccggagtatggcatgctttctggatcaccgaagcagtcacctcggtcatcgccgcttatatctaccataaggcagtcggaagcagaaaataacatctgtcaaaaaagaggctggtgctttaagcagacatttcattttgaagtgataagtaatatgccagaaaacacagcatgtagatttcagctggaactgcataggatacaattatttgaaaaaaatgagagcatttcttcctgccggaggtttgcatctgattccgtgtctcttccacgtttggactctcccggtgtgtgtccgacaagccacagacaatgagcggactttttagtgcccctagtgccaccacttcacagacaatataaaaccgcgcgaaccgaaactcgttggcatctgctattgaaaacatggcagatgccaattcaaacatcggcttcgcgcggttatgttttgctcagtggtggcacaaggggcacgcacaaaagtcctaaaattgtctgttggcttgcggacacagtccgtggagtgttccaaacttggaaagacacggatcatcgcagatgcaaatcccggctggttagaaatgccgcattttttgaacagaatgtatcctatgcattccagctgaaatcaacagataagctgtctatcatattacttatcgcttcaaaattcactgccctctaaagtaccagccccttttgggacacttcctcctgaaagatcatgcgaagctgccctttcagcggaacattcagttccctcagggtgtcatccaatgcatctaacgtctcgatcatgtccaccacgttcgcattgcttcccatgtgtccgatacggatcacctgccccgctagggagtcaaacgatccagccagcatgataccgtgcttctgacgcatggtctgtaaaatagcatccgcggtcgtctctttcgggacgtcaaacaccgtgacggtattggagaaaccggacgcaaggtgtaagttcagtcccgctccgcggactgccgccctgcatgcctcaccgatccgcgcgtgccgcgccagcatatccggatcacccgcgatattgtcgaacgcggcgcgcagtccgtagatatcactgatcggcatggtgtacgggaaccactttttctcgtaatatccctcaaacaccttaaggtttgcataaaaagaggcaatcggtacatttctgccatcgatggctgcccatgccgcatcactcaccgtgacaaacgtcagtcccggaggcgccgaaacagctttctgggaaccgccgcagaggacatcaatctgaaaatcatccacgcgcacatcctcgccgaacatgccggagacggaatccaccaccgtgagtatcccgtattttttcagaagcggacaaagcgcagagatgtcatttaacatgccgctcggggtatcgcagtgcacgagcgttgcatatttgtaatcgtgatgttcctttaaatattcttccagggcggccggatcaatcggatttttctcatccacggaatacagaaccggctttccgccatacatggaaacgaaatcagcaaaccctctgccgtatacgccgttatccagcaccagtaccggatcgcccggttccgtcagggaggcacaggcagcctcaagccccagaattccctctccgcctaaaatcagggtctcattcccggtgtgcagcaggcggctgatcagttcacaggtctccttataaaaatctacgaaagtttcatccagatccggattggtgcagggaaaactgcgcgccatgcggacattctctttgacctgcgtagatcccggtgtcataatcttatacatggaaacgcctccttagttccacagttttgcagctactttctttaacggtgcaatgatgataagaacgatcacagctgctgttccgatctgaagcaggttgcccggaatcgatgtcaccggtgtgatccagttgccgtaaataattccctctgcgatgtaatatccgccgatcttgatcgcgcaggcagcaagcattgccacaacataccactgaaagccctgcttcttctctgtaatccatcccatcacaaatcccatgcatccgacgatcacaaaggtaaacggtgcccatgccgtccagccggacaacagatcaaacagtcccatgccgactccgccggcaatggctcccgtctttttgccaaacaggattgcgaaaataaacagtgggacatttccaagatgaatcagtccgccctgcggcgcaaacggcaggcgaatgttaatcagccaagtaaatacatataccagtgcgattccgatcgctgtgacggtaagaaaacgcacctgctctgtgctggttgtttttgtgctgctcatagttttagtctctgacatggctctatctctctttcttttttgttagagccatgataccccatttctggacgaatgaatatgtccagttttgctatttttgaccagtccagttcgatctttttacccggtaagccccatatttctccggtattcgcttggtgaaacgccgcagctgctcttaaacaacttcataaaatgcttctcgttctcatagccgactgcctgggagatctccgcgatgcgcatatccgttccggcgagcagacgcttcgcctccttcatgcggatgtctcttaagtaattgacaaaattacttccggtatactgcttaaacgaataagaaaacagggaataattcatggacagataattggagacaaccgccatattcagatcactggcatagtgttcttcgatataggcgaccgcctgcttcattttctgctgattcccgtttgtgtcaaactggcttaaaatccgcgcctgcagaccggtcacaaatgccagcaccttctgttcgtagcggtcgattgcgtcctccccgaatgggtctgtaatctctttgatctccccgcagttttctttttcctccagcacattccggtacgtttttgacgtctccgtaaggaaatccgtcatgcactcctcaaagtcccggacatcgatgcggccatgctttacctcgtaaaaaaattgcgtccagacgtgctgcagttcctcggtgcggtcggttccaagtaactgcacccgctgcagtttcatctcgtctgcaaccagctttgacgcctcctgcaccagcttctgtgggacacgcggcatctcctgcccatagcgcatctgactgcggttcgtgcaaaacgcgcacctgcgcatttcccgcgcctccagatatgcctcgcgcagttcgcggattccctgatgcggccggctgattccggtatattcctgcaaaaaaggatattcccccggacggtccgaaagtgcttccgcctcgattaaaaagagatcatttccctcgacatcgcccaggaacaggcagtccttcgggcaggattcctcctcttttttccggttcctgcagcagaccacatacggctttccgctcagatctaaaataaaatgctggtcatactgggtctccaacatggtaagctcctcttccggcatctctgccagaagcatcagatgacggatctgctgctgtccgagcttctggcgcgttttctcctgctccctgccctcctcaatctcctgattcagcctggcaagtatgtcgcagattttttcgcgctcgatcggttttaacagatattcccgcaccccgttgtgcatcatcgccaccgcatagttaaagtcatcgtaaccgctgatcgcaacggtgagcggtatgtgttcacattcctgcatgcgctccaccagctcgattccgtccatctttggcatacggatatccgtaaacatgacatcgatggactgctcttttaaaatctcaagcgccgtctcaccgttgttacattccataatcacttccaccgggacaccgctccgctgaatcatcttgcggagtccctgccggatcaatttttcatcctcaacaatcaatacagtcttcattctgcttctcccctgtgcgtcatcggaatgcggacgataattttggtatagcatccgatctgcgacgccacttctatgccatacgccccgccaaatgcaatctggatccggtcctgcacgttttttaagccgattccgtttccggaacccccgctcgaatccagttcccctgcaatcttctgacgaagctgtgccatctcttcctcggtcatgccgcgcccggcatccgtaatttcaatcacgcagtcgtttccttccacgcgccccttgatgtagatgttggtatcttccgccatctgctcgattccgtgatagatggcattttccacgatcggctgcagcgacattttgggaatctcctgctgtaaaataatctccggcagattgagtgataaatagatctcgtaatcaaaccgcagattgattaacgccatataattcttgatatattccagttcctgctccaccaggacattgcctgatacccacttcatgctgtagcgtaagagcttcccgagggatgtgaccgcatccgaaatatcgtactcctcgtcgatctccgccatcatcttgatggactccaagacattatagataaaatgcgcgttaatctgattctgcagcgcacggatctctgaattttttaccagcatttcgcgctttagattgtcgtccatgagctgcttgatcctcgttaacatcttgttgatctgtgttcccagctctcccatctcatccggtccgcagtgctcgatcaccacgtccagatctccgccctgcacgcgccggatggcgcgcagaatctcgtacagctgttttaacagatgttttacgatcgcattgataaaaaatgtcagaacaaccaaaaacacgagcatgaccgccacaaacgtgttgcgcatgcggtatacgtgatgaatgttggacgtaatatttttcacgcagagcagggtcccgtttaattcctgcaagggaaggtaggatacaatcagatgctgtccctgcagcttcagatagcaggtctgtatttcctcgtccgccgtatactgtgccatgatctcggcgagcagttcctgccgtcctgtgttttcgtcctccccgtcaccttctccaaaataacacccgccgtcctctgtcagaaaacagctccactcgtcctcaatgttctcgtagagactgggaaacatgttttccatcgtcatagccgcctcgatcattccgagcgtcccggaatcgctgtcctttatctccgtcacgagcgataagatcttgcggttctgtctcatcgtgtaagaattaaaaatctgatcgttaaagtcgtaatgccagccggtaacagtctcctccgactgccagggctgcttttccatgcgggaggctgcatagagaatcggcatcatctcctgtacccggtcgtttgacgcatacacacgcacgccgtagagaatcgggttgttgtttaccagacgctcgagggatacaatatcgctgttcttaaagctgtaccattcctccgccgaaaaagtctccccgtccttcgttcttttgagcatttccaaaagcggctcatcgctcaggaaaaactgtgtggacatgttgatggaattgatcttggttgcaacggcatctttgttgcgctccatggtgtactccatatatccggtattctccgatacgacgtttttctccatattgtaaaaaaggatgccggcaagaatgccgatgggaatcaccataaacagaataatcacaagggtaaactttacattcagtttctggctgacaaaccgttttttccaattcatgtaacactctccgtctctttactggatgccaagcttctctttggcgctgttcatatatgccgtcttcttctccatgacatccgtatagcccagctcatcccgcttctcaataaattcttcaaaaagggtgtcaaactcctcctccgatggtgccataagaagcgccggaagcgtctggctccagagctttgtaatcttgtcctcctccgatgcctccttggagccggagtcaaataccacatcatactgaccgttgtatacgacatattttcttccccattcctccagctgtgccgttgcaggcgatggttcctgtttccactgaagctgcatcacattgtcctgcagcatccagtaggcatcgtccgccccgtattccctgtcgtaagctgcgcggtccgtgtccagaatctgcttgatgttatcgcggagcaccggctttccgtcctttatatcgtaagtcacaccctcgacgcccagataggtgagaagctgcccgtgctcgctcatcagataatccagaaacgcaatcgcgcgctccgggtgtttgcagttcttggaaatcagcgtcaccgtccacccgttgatcgtggttgtcgggcgcagcggatcgtccccatttgcatttctcggaccttccaccgccatataaatgctgtccggatcattggcatataaaattttctgctgtgtcagcatatccgaatattgatacagcatgcagaagtagcggccctgcgccactttttcctccatctgtgtccgggtgtccacaaaaatatcattcgcaagataaccttcctctcccagctgtctgaatactttcagccagcgaaaatattccggatcggtatagcggtcatagtagacgccgtctttctcccacggaatggcaagaaaattcatcaggtatttgtcaaaggagacatttccctcgttgtcgaacacgtgcgcaccgatcgggatcagaggctccccgtctacttccggaaacatctccgctgccttctttaccgctgcgcaaaagccttccggtgttgtcatatccgggcttccgatcgcctcgtagatatccttgcgcaccagaaaggtctgattgctgcttaaatcctcgcactgctctacatcctgcggcgtgatggaggagttcgggtaggcgtaaatattgccgtcgtccgtggtataccagttcacggccaccgggtccgagacctcccagaaatacggatcatagctgtccgcaagctcattgagcgcatagaccatgccgttttctgtcatctcgctcacctgcggttcccaccatccgagcgtgattaaatccggcagcgagtcggacgcaatcagggcgttcagtttttcggattcatttccgagcggcgtgataaaatgaatatccacgcccgtctcctccgtgatcgtctgcgacaccagattctcgccccacggcgtcgaaaaccaggagtagttgatataccagtccagcgtaaccggatcgtctgcgtacgtctgccatgccggaagatccccgtccggctgcacttgtccggctgcttccgtttccggcacatttccggaagcgccggtcataacattcccgcaggcaccgcacagcgccgctgttataagagaaaaaagcgttacacacgcccattgttttttatatttgccacccattccaatcccccgtttttctccgtaaaatcaaagattttcctgtctctatcatataatatttcccggcatatttccagcaggaaaagccgtttcccacgctccttcgccagcataacgcacacaaagaagcaccttccgtttccggaaagtgcctctttctaagaggagaactatgaaaataaagttttgaaacctgctggcattttattctttgacgctgcccgccgaaatactgctgataatgtatttcgagcagaagcagaacacaatcaggatcggtatgacagagattgccaccgccagataaatagcgccctgatttctctgaatgtccgtcgatgcttttaacgtcgccatcatgaccggcaatgtaaacttctcatttttgtttaagataatcatcggaagcagataattgttccagtttccgataaatgccatgatcgccatcgtcgcaataccaggagacataatcggaagcgcaatcctgtggaaggaatataattcgcttgcaccgtcgattctggctgcctccaccagtgccggcggcatcaccgataaaatgtactgtcttaagaaaaacaccgttccgggtgccgcaaccgccggcacaatcagcgggatataggaatttaccagttttaatttggtacataaattgtaaaaaccgatcaggctgagctgtcccggaatcatcataaacacaaggatcgccgtaaagatcagcttgttgccgcggaatcgatacattgccagtccatatgccgtcatcgccgagaaatacgccgtcagcagtgtggcaggaactgcaaccagtaagctgtttgccattccgcggaacagattaaagaaactaaatacggtctcccagttttctttcagatgcgtgctcggtatcagcgtaaagaaatgtgtaatctccacaccgtccctggtcgcgttgaccatcatcagaagaaacgggaacaggcacgccgccgcaagcaggacaagcagaatataaataacgctcttttttatcttatcacccgtcgtcataactaatcctccttgttgactaattttaactgcagcacagatacaatcagaatgattaagaacaatgcatatgcaatggcagatgcatatccggtctgtgttgtgcctgtcgagaaaccaaatttatacagatacattaccacggtctcaattgagttgtaggatgccgccgtcttctccgacataaggaacggcaggtcaaacatctgcagtcctccgatcaaggaagtgattgccacgtaaagcatgatcggctttaacagcggcagcgtgatttttccaaatgtcgtccagcgccctgccccgtcaatcgctgcggcttcaaagtaatctttgttgattccctgcacgcctgccatcagcataatgaaggagttgccaaaccacatccatgcactgatgactgcgatgacgcttcctgcggtgccggaatttccaagccagtctaccggcgccttgttcactccgaagaactgatagacggaatttaagatctggttaaacgtaccgtatctccagtctaacagtgtcttaaagagaaaagcgacagaggtggctgcgatcaggttcggcagataatacagtgcccgaaacaccggcagccccttaaatttatatttaatatcactgaacacaacggtcagcaaaaatgcgagtcctaactgtagtacgatattaacgccccagatcctgattgtattccagagcgctctccagaaaaacttatcggtaaatacgcgtgtataatttttcagaccgacaaaatggtacggcattcctgccagcttgctgtcggtaaagcttaaaacgagtgtgcggaataccgggtacacactgaaaatcaggaaaacgatcacaaagggagccacgaaaaagtagcctgcccggttatactttgtgaggtttgatgtcttttttttcggatttgtttttgccataggaaatcccctctatctcattttgtattccccctccggcaccgccacaacatcctttggggacattgtggctgccgtccgggaggataccaagttaccctgctcttatctgtttactgtgatatcaggatatgtagattcaatcgtgtcatagaaatcattcactgcctcttccttggtcatctgtcctgtcttgaccgcagagatcgcattgccccatgcatcaccgattgcctgatcgtaacgggttaccttggaggtatcaatctccttcgcctgctctaaccagaactggtacagtttctcaccgccgtagattgcattttcatcatctttgtgcttctcaagcgcggatttcagagaaacggtatcgccctgggagaaatcgatccaccagtctgcggtgtcttcatttaatgtacagaattttacaaactcccatgcggtatctttgcggttggactgggaggaaataccgatataggtaccaccgtcaaatccggaggaaggtcccttgcagacgccccacaaaccggaggtgtcgccgacattatctctcatggtaagtacgccccaggacggcagtccgaacgcgaagaccgtcgtggtgtccatgcccttggttgcctctgcaaactctgttgcatcccatacgttgacagaatcatccgcgtaattctggatatctgcggttaagatcggaacctctcccgccattgcctgataccacggcgtggaccactggttggcatatgcggtgagatccttctgatacagatccacacaaagatccatgtaatcaaatcttgcctggtctacatttaagacaccgtcaaccacccatgcggaatcaccggaaaatacgcccatctctgcgtctgaggagaaaatacggtatcccgcgtccttcaacttctgcgcggtatccagaatagtcgggtaatccttaaataatttgccgacctcatccggatcatccgttccgaatacttccttggcaatatctcttctgtaatagatacctgccggggtgatctgataggaaatggctctctggatgccctcggaatcctgtccgactttccatacataatcaacgatctgatctgcatagtcctgtgcgttgtacggtgcctgattcagatcctcaaaaaatcctgcgtcgtaaaaatcctccagcatcttcggctcgcctacgataatatccggttcgctctcgccgcccaaaagcgctgtctgcaccttggtcggatagtttgcaggctcaatgacaaccgtgtcaacggcaactccggtctgctcttcaaagcgctcaccaaagtcgatcaggtcgtttgagagtgtccataccaccagcttatcatcgccggaagcggacgtgcctgcaccctccgtagattctgcggtacttcccccaccagaagctgcatctgtgcttgtttctcccgaatcgccgcatgcggtcattgataatgccataatgccaacgagcatgacggatactgcttttttccaattcataaaaatatcctccttttatttcaacatctctgttgttttgatacttgcattatagatgctttcatttcctcaaaaaatgatccaaattttaaaaaggtatcatttttttagtccacggcaacctccatttttctgacccttccggcgcggatatcctccgccagttttccggagactttctccccctcaacggtcgcctgactgccattttcatagaaaaacaccatatggcggatccggtaggttcccggcacataatccctgtacccgccaaattcatagcacacggtcgtcttactcataaacgcagcggaaagtctgccatcctccggaatcagatacgccggaatggccggtgcaagcgaaaagaccagttcctcctgctccgtccggaaaggatgtgcgccgaacatcatctctttccacatgctgataaattcgatcgttgatccgctgagtcttgccacgaatcctcttccgcggcaggacggatttggattcctgctgctggctataaacgaggaattttcgtaaatacttcttccgtaagtctccgggttctggaacggtatcgcagccttcttgaaatccgcgaaaaattcttcatagagaccgctgcgcagaagttcaagaagatatttatattccatatgaagccagatggattcgttttcgagccagcccggggtaaatgcacgcgcacgcccaagttcaaaagaggaatccgcaagggaagcattcaccttgtacatggacagttccccgtcgtagagatcgctctctttgaccgcttcgtacagggcacgcttctcgccctgctccacaggcagcttcagatagcgcaccggtccctccagaaaatacggcatatttttgggaacaaattttaacgggcggatgccgccgtcctttaacttttcatactccggcacctcgtaagtaaaatacgtcgggcagatctccccggagatccggcgcgcctttttgattccgcaggtaacaatctccaagaatccttccagaatcgccgcaagctgctccgtgtgatagaccatcttcttaccggatacgccctgataggtcttgtcgcggtaaatctccttcgcgtcattgatccggttccagaaggacaacagttcctcgtcccgcatgatattgtcgtgctccagccgcgtgatcagattcagttcatccaggaaacatcccagttcctctatgagtgcgacttctcccggatattgctttaaggcctctatggtgtaggagagcatgcgcgccagctcgtaggtctccgccatggaagaaccgaaaagtcccggcataccgtttagggcgtcataccatccgggctttccgccctccatctcgattcccattccgtaagcatccagcgtggcaaatttcacagcactgagcagtatcaatttctccatcagcgtcatggtcagcacatccccgctgccgtattcggttctcaccagtttttcccccaagtccgcccgcctggacgcctcgtttaacgcccggtactgccttaagccattctccgtctccacatagcggcggaacctgcggttcacattgattctggacaaaaaggtggtatagacctcctcatagagcatttcctcctcctgctccgggaacacggaaaggtaatccagaatcagatcgagattgtaggtccagtgatcgctccagtagccttccccgaacgatccgttcaccatctcctccgcaaaatcaatgacccggataaataacgtctcatcccaggtatcgccgaatacctccccgaacttccggcagagtgctccaggcgtaaacggctttgtcgcgaagtcaagcagcgctcttctttgctcctccttcacgtctgccagcagcttctttgcccgctcctttgaaaggcggtaggtcagtttctcgacgccaagcggattgtacccgtccagctggatcagactgtagaattcctgtatattctttctgccgacgaacggtgcaaaaaaggtgtcgcagcggcggttctgattgacatcgcggaagttcccgtttccctgcgaatagaattccggcagcatggaaaagtaattgtaatcccgctccagatcaccgtgttttctggaatagacataaaaaatcttattgttccccagctgcatcggataaccgccgcgcagcacattgtccatataggtgtacctgcagtaggcatcgaacgccgcggaggctgtcctggtgcggataccgtctgtcagcgcctctgcaagttcatccgcttctcttttttttgcctcaaaataggcggcatctttcttttccgcaaaatattcctttaaaagctgcttgttctccacctgtccgatcagttcatataaggtgacgcttccgcccggggcaagggtgcgcgtgatgccgtaaaagctgcacggcagcaggttctgcgtcatctgttcttccagaagaagttcctttaacgggcgttcttcaaaaccgaccggtcttttcagcgacagatcataggaaaaaatcaaagacggatccacgatcggttgtaaccgtctgccgtccgcttcgcagcatgccgagaagttgccgccgtcgatcctgcgcaccgccgcggtgtcatccatgcttgcccgcacgcggtagtacggcagaccctcgcttaaatcctcgacctgcatccacgctttcgcggtctgccccatatttttcatgctgtccatggacacgccgtacggaatcaccgccggcatgccgtcaatcagttccagctcgatgggctccccggactgattggtgacactcaccacgcgcacaagcgcgccgacattttctccgggcagtgtatagtacaccacttttgtgtccattccgcttgaccggttctgctcctcgattgcaagaccattcatgtgaatctgcatccggtgcgcgatgttctcatccgaaaacggttcaaaaaccgtaccgttcttctttaaaaatgtgcggaaccctgtggtctttacattctgatatgcctgatgcgccggataaaattccatgatcgcatgatctttattgtccacgccgaaactcaccacacactgtccgcggttcacatagtagcaccagatcgggattccccgtattcctgcaattcccggcagaaaactcgcaaatgtggattttttcccataatcattcattacaaacgtctcatttttccctgtcatctcattctcctttacaccagttccaccaaaatttcatgcgtgacatcaaaatccagctgctttaaccgctccctatcgatgcagacactgcgcgtctctttctctcccccggaataatcccacaattccccgtcaatccggatcgttcccgggcggtaagcgccgtactccttgtgctctttgttctcgtagaccagatgcagcgactgtcccgcaaacgaaaagaaaagctccgctctttcatccagatcaaactgttgccgctccagcttcggttccaacatcagattgccggcacatcccttcgcgccgaacatttccgtaatcacggtaagcatgtaccagcttgccgcccccgtcagataatggtacattccctttccgcggctgttaaaatactccgggattcccggataaatccggctggtttcaaaatggacagactgacggtaaagcgcatccaatgcccggtgcccttcctttacaaatccccgcttatagagggcgtttgcaaacatcaccgccatgtgtgaaaagaccgcaccgttttccttttccccgtaagcgaacccgaacattcttcccagatccattttcacttcaccgaaatccgtatttaaccggtaaccgcccatcgcgtcgcagtacagatatttgtctgcgctgcggacaatctctgccacctgttcatccgtcgcggtctgtgccataacggcaaacacctgactggtcagcatcatgcgcacgccctgcgcaaagacaccctccacgcacctgccatgattgtcatagtatccgttaaaccagccgtttccctcctcatcgttcacccactctgtggcacggatatgtccggtcagaaaggctgctttcttctgcaggctgcggacaagctctgtaatcgaaacctctgtcttctgcccgcttacttcatggatgcatgcatcggtatagcgcgttaagagttcctgctttttttgaaccgatgcatacagggtgtcgtcatccgcaagcagcacgaaaagatcccgatttaacggcacagactccttcccggttttctctgcgtagagtgcaagcagctccgcgagttcccggagattgcctgcataggcgttggtaaatgcaacgctctccccgcgctcgcccgccatatccagcgcatcgttccagtccgcgccgcgaaggcggatatgtccgtgttcgcccacctcgtagaaagccgtcagattctgcagcagaagatgctccagcacgcttccgcggtagacatttcccgcggcatccctctgccagcagccgtcctgctccttccatgccgcatccttctttgtcccgcgccctgcctgctgatccttaaaatacgggatctcttcctccagaaccgcaagatcgccggtctggtcgatatagagctttgtcgtcacaaacggccagaccccgtgatccatccacacgcgcgtaatctgattgcggtcggcgataaaggttccctccttgcttccgataatggtcgcattggttccgtcgatgcggacaccctgaaaattattgagaagcatctcgcgcacaccgtccggattcatcaaaagaagtgccagacagtcctgccagagatctctccagcctcttcctccctttccgtaatcatggtgcggcaaaaaggaacagccatagatccggcgcaggatcggctgaaagctgacccactgcatatagcggtcaaactggcggtctttcgtgtggtaggatacatttactttctgttcccagtatgttttcatgcgctcatacgccgccttcgtctgcgccgccgtgcggtacgctgccgtcatgcttaaaatcgtctccccggcatattccgtctttcgcaccgccccgatcatgatcgtgtatcctgcggtctcgcccggtgcaagaatcctctccttaaaatggagtccgccgaccgcctcacatccggcatatgcactgcccgccggcacaccggcaagatttttgacaaccgcctttggccgctcaaaattacctccctcgccgataaaatcctgcacggtcgggtaaaaatcttccggtgcctcccccgtctggtcgtatccgcacacaaagtaggtcatctcgttcgggcggtgcccccgctcgtcaaaagacatcgtcggcgtcacaagcacaccgttctccaccgtgcggatgcggtgcagcagcgatgtcacatgccggtgatccctcagattgtccgcgctcctgccatagaccggtatggctgcggtcggcgtgaatcgtacctgcatgttgcctgtattggtaatctccacatacatgatctccatcggatcgtccagcggaacaaacgatgtgatctgtgccgaaagctgatacttcctggaggttcttgtcacggtctgccacataaaaccggctgtcacttcgttttcatccgtaagatccgtaaatttttttgcaatttcttccgccgaattgcccgtggcggaccagcttccgtgcgttccgatatggcaccagaaatttctggcattccggttattgtgaagattctccacgctcaccggctccagcagaaacgtattctgatccagcttgcagtcccctccaagtgtcggtgtcaccgcgcttttgataccacactcccctgcgaccgggaaatacagatcactgtaatctgccgcccccggcagagaaaaaactcccttatcactgataaattgatatgtattctgcatcctgcaagtttcctttcatttttttattattctaaggaaaaaaacaggcacaaaaaaagatacctttttttttaaaggtatcttttttttagaatcccagaccgtccggaaaaatctcatgcagcggtctttttatttttttgcgggtcacctcgaccagaccgagtgcggtcatatcgataagctgcgccggaaccggatctttttgcagtgccgcccggaatgtcttaagcagttcctcttccgcggattttgatgtcagatttataaaatccaccagaaccattcccgagagattccgcagccgtagttgtctggcaatctcctctgccgcttccttgttcacgcgcagaaagttctcctgcatctccttttttgccacattctttccggtgttgacatccaccaccgtcagagcctccgtcggctgaatgaccagataggcaccggattttaaccatacgcgctcactcaatgcatttttcagctccgaccggacactgtagagtgctccaagggagagcgccggatccttgtaataacggatccggattccatccgccgtcattacatcgtccaccggcacgggcacgcttcctcccgtcgtaagcgcctgcttatggatccggcaggcactgcagatatcctcgaacattccgcggtcatctgtcacaatctcttccagatcgtccttccgcaggtctctgatatggcgcagccatcccgcttcctccctgtatacaagcgtgtaacagttcttgtgtgccgccgcctccgccatcgtctcatagcgctccgaaagcacttccagttcaagcagaaccgcctcgtcggaagcctctgcggcattggtgcggagaatcacgccgtactcccctgccgtctgctctacaagcttcaccagacgctctctgacctccccctttacctttgatgagacgctcttcttccggtttccggaagttaagacggcataggttcccgcgatcgtcaggtttgtcgtcaccgcgggatcttttgtcttaagcgcctcgcgcgagacctgtaccagaagttcatcgcccgccgcaagcgcctttgtctgcgacagctttctggtaaaaacgggattcttcacatcggacagcggcagatagcaccgtatatccggcgctatcttgacaaacgcggcatttagattggtgacaatgttctcgacttttccgacatagatattgccgagcagtgatgtctcccccgccgcctccggcaatacctcaatcatatgttttttctcatcataaagggcagaaatcagatattcctgcccttttatcttctctcgcgttatcatgtaacggttcattcgattacttctcccatcgcgcctaaggacacaaaatcatccccgtcggacgcatagacatccttcctgtgaatctgaatcgcattgggatcataggtaagtcccatgtgtaaaaacagcgcctcaagcaccagctccggcttcagattatccgtacttcctgtggaaagtttcagatagaaggacggcacgccgccgcgatccgtcacctgaaagccgtagatgagtggtttgatatccagcacgcgctcgctctttttcgtctgcttggtgatgagaacctcatccggtttctcaaagaaatcgcggataccgtcagcaaacgccaaaacagaaaccggtgccgcatacccttccttaaaatacagatcataatctgcggcggcaacgatcgacattgccgtctttgcctgatccggaagtttcacataaccggtgcactccacgccctccaccatgacgccgtttaacgcccggagggattcctccgtggatgcactcgtgtgcacttcaatgtccatatactcgccgtcgctcgtgatgcccacgccgagcggcgcagcaaacgacatgatctggtgcggggaaaatccctccgaatagcagatgtcaatgtgtgctctgcgcattgccttctggaagtaccgcatcacatcgagatgtccgataaacttcatcacaccgtacttgcggaaacggattctaattttcatagcagacacctcctccgaacttcttcacaccgcagcccgaacagcgcatccggcagttcggcgtcacggtctctttcatggcattgttccactcacgctttaaaaattccttggtcacgccggtatcgataaaatcccatgggaaaatctcgtccatggaacgctcgcgcatcgtgtaaaaatcgggatcaatgccgcactccgcaaaggcgtccagccatctctgatagtcaaaatattcggaccatgcatcaaaaatgccacccttttcataaacctttaagatagcctgtccgattttccggtcgccgcgcgccaatacgccctctaaaactgtcacgtccgcctcatgccagttgtatttaatgctctttttgtttaactgttccttgaccgtgtcgttgaccacttttgcacgtccgatgtaatcctccggcgggtacattcttgcccactggaacggtgtaaacggcttcgggacgaaaaaggaggtactgatcgtgatctggcatctgccgttccgcttctccttgggaacggtgtcataatagcgtgccgccgtctcattggcaagctccgcgatcgcccgcatatccgcctctgtctcggtcggaagtcccagcataaagtagaacttgaccttattccagccgccctcaaacgccatctgggcgccgtttaagatgacctcctccgtcagtcccttgttgatgacgtcgcgcaggcgctgtgatcccgcctccggtgcgaatgtcaggctgctctttttgatgtcctgcaccttgctcatgacatccagtgaaaacgcatcgatgcggagcgacggaagcgaaatattcaccctgcgctccctgcactcgtcgatcaggaaattgacaagttcctccagagagctgtagtccgatgaacttaaggagctgagtgagatctcctcatacccggtcgcctcaatcatctgtgtggcaagcgcctttaggcgctcaatatttttctcgcgcaccggacggtacaccattcccgcctggcagaaacggcagccgcggatacagccgcgctgaatctcaagcacaacgcgatcctgcgtggctttgataaacggtacgaccggcttttccggatagaccgcatccgtcatatccatcacgagctgcttggtcacagtcgccgggatttcctcatccaccggtgtaaacgacgcgatcgttccgtcttctttatattccacctgatacagggaaggcacatagattcccggaatctttgccgcctcatgcaaaaactccctgcggcttctgcccgcccgcttcatctcctgatagagatctaacatgcggtcatatacgacctccccttctcccatataaaacagatcgaaaaagtctgcaattggttccggattgtaggtgcagggaccgccgccgatcacgatcggaacggtatcgtcacggtctgcggcaagcagcggaatctggcttaagtcaagaatctggagaatattggtataacacatctcatactggatggtaattccaagaaaatccatattcttcaccggctcctgtgattccaggcaaaacagcgggatgttctcctccttcatgatcttgtgcagatccggccacggggaatacacgcgctcacaccacacatcgtctctcttattaaacatatcatagagaatctggatgcccagatgggacataccgatctcatatacatccggaaagcacatggcaaaacgaatcgatacctcgtctttgtttttacagacgctgttcaactcgtttccaatgtagcgcgccggcttatcaatcttcatcagtatctcatcggataacgctaactttgtcatttcttttatcctttcattctgtatgcagaagttctgcaagcactgcgtcgcactcctgcaaaattgtatcataccgattatcttcgatcatgtcaatcattttcgccggagtgacgccgcaaaccgtatttccactgtcatcccatgcaaaaaagaacaaaaacagcagcagtgccacaagaaagcggagctgtccccccgcgcgccctctctgtggctcctctctgtcaaaaggctctcccgcatccgctcccgtctcaaaggaactgcggacctgtgagacatacgctctccgccgttctacatagtctgtcatactgcacctctcctatcccgcctgtgctctaggatactatatgagatttttgggaaaaacatgtgcgcagaacatcgatcagttttgaaaccgcaaacgtcaaaaaacggatgatggtctgatccaaaatgacggctcccacaaatgacagtgcaaacgtgagaagtacggcaagcagacagcctcccacgatgccgccggacaggacattgacgtgaagcacctgcttgacggcatagtggagcacgccccagtgaatcagcagaatcgaataactgtacttcccgatgatgcgcacaaaggggctctctttgctgccgcagggcaccagccgctttatgagcacaaacacggcggcggcataaaacatcatcgtaggagcattgttgtaaatatagtcgtcataccagccatggaacagaatcacatagcaggtgatcagatatgacacaagacccgccgcaaggaaaaaattctccgcccgcctccctgcgcggttcgccagatagtagccaagcagaaacgcccccgcatacgaattcacaataccggagagtgccgccggcggcgtaacgccaagcagcggcacataggtgacatacgcattcagaaggaagatcacaagcatcacgccgttcatgaccggatcgggaatgttctgcaccagataccgcaaaaacggggtgagcacatacagccagataatgacatagaccagccacagatgcggcgcttccaccggcggtccgatgaagaaccgctgcagcatcagtccccactgcgacggagcgagccgtccgattccctctttggcacagacatacagattgtaatagaccacgagtgggatgaagacacggataaaacggcgcgcaaaaaaatccctgcaccgctctccttttaccggcagcagcaatgcgccgctgatcatgacaaagaacaggttgcaggacaaaaacgtataattaaagacttccaatacgcgaaaaagcagcgtccccggcgctgctgtcgtcttcgcgagcgcgacggtgtggacacagatcacaaacaccgtcgcaatcacgcgcagaacatccatataaacctttcgcggcggctttaccgctgggaaagttcctgtgtgatatcctcccatgtgactcctctttctgccataagcaccatcatgtgatacaggaaatccgagatctcgtattttacctcttccggatccggattctttgccgcaatcacaatctcggtcgcctcctcgccgactttctttaagatcttatcgattcccttgtcaaacaggtaattcgtgtaagatccctccttcgggtgtgccttgcggtcgagaataatctcatagacatcctcgagtaccttaagcggattcttctccacatattccttcttgacaatctcgttgaaaaagcaggtcggattgccggtatggcacgctgctcccacctgggataccttcgcgaggattgtgtcataatcgcagtctgccgtcaaagacttcacatactggatgtggccggaggtcatgcctttcgtccagagttcctgacggctccggctgaaataggtcatcttaccgatattgattgtggtataaaaagcttcctcgttcatgtaggcaagcattaacacctcatctgtacggtaatcctgcacgatcacgggaaccatgccttctgaattctttttcagatcatcccactttaacgccgggtcaaaattgtccatcttgatgcccgcggaagaaagctgtgacttgatctccatgatgttggtattcggatcgtttaagaaaccgccggcaattccgcgcgtgttgctccgctttaacacctcaatgatcttctcgtaatcgcaggtctcaaaatagaccacatacggaacatccgtaatattctcaatcgcatctaaaacactggtgtttaacaccagaagttcatggaaattctcattcatcttcgcctgatgtttgaacacgaagtccacgttttccaccgacacgaggatccggtcttttccgaaacgcttgctcgcctcctcggcaagctcgatgctgttcgccttggcgccgttgacaatgacctgaaggcatccggcatagataaactttttgatgtcctcgaggcggttgatgttgccgcccgcgcaggtcttgatctccacgttgcggttgatgttcttgatcgtgtgaatattcttctcatgctcctcatcatcgtcagagagatcaaaaatgataatcttgtcaattccgttgtcattgtaaagctttgccagctcgatgacgtccgccagcggggtgtgatcctcaatcccccgtaccgcctgtccgttctttaagtaaatcgttgcaacgatatttttctgttccataaaaatataatacctttctataaactgcccttcgtagacaaaatatccgtaatccgcggatcataagatgtcgcctcgtcgagggctcgcgcaaatgccttaaacatcgcctcaatcatgtgatggttattgcccggcgtcagcaccttgatgtgcagattcatccctgccgtgtaggagatcgcatagaagaactccttcaccatctccgtgtccatgtatccgactctctctacggtaaaattaccgtcgaaggacagatacggccgtccggagagatctaccgcgcataaaacgagtgtctcgtccatcggcagaatacagcttccgtaacgcttgatgccctttttgtccccgaccgcctttttgatcgcattgccgagcacaattccggtatcttcgatcgtgtgatgacaatccacgatcagatcgccctccgccttgaccgacagatcgaaaaaaccgtgtctggcaaagccctcgagcatgtgatcgaaaaagccgatcccggtatcgatctcgcttactccgctcccgtccagttccagactgagcgtgatgtctgtctccttggtctttcgcacataatctgctgttctgctcatactgactcccgttccttcccaacacttcaacttttattatattacggtttccacgaaaaaggaattacttttgttcagaattttcctcaaaccggacacggattgaattggcgtgtgccgtgagtttttcgcactccgcgaactggatgatgtccttgtatacattctcaagcgcctccctggaataggaaatgatgctggatttcttgataaaatcatccacgccaagcgccgagaagaacttcgccgtaccgttggtcggaagcacatgattcggtcccgcaaagtagtcgccgagcggctcggaggaatattcgccgataaagattgctccggcgttgcggatcttcgtcatcacctcaaacggattcttcgtcacaagttccaggtgctcggacgcaatctcattgaccgttgcaatcgcatcgtccagactgtcggcaaccagaatgtatccgtaattctccagcgattttgtgatgatctcctttctcgacagcttctccacaaagcggtcgatctcagccgccacctgcccggcaagcgtgcggcttgtggtaatcagaatagcggaagccatctcgtcatgctccgcctgcgacagcaggtccgccgccacataacgcggattcgctgtctcgtccgcaaggacaaggatctcgctcggccccgcgatggagtcgatgctgacataaccgaacacagccttttttgcaagtgccacatagatatttcctgggcctacaatcttgtccaccttcgggatgctctcggttccgaacgccatcgcagcgatcgcctgcgcgccgcccaccttatagatggcgtccacgcccgcctcctttgccgccacgagtgtggacggatagactttcccgtctgctcccggcggtgtcgtcataatgatctgctccacacccgccacttttgccggaatgacattcatgagcaccgacgacgggtagacggccttgccgcccggcacatacacgccgactctcgcaagcggagtcaccttctgtcctaagataatgccggattcctgtgaatcaaaccaggaattctggcgctgtctgctgtgatagtctcggatattgacaagtgccttgcggatcacggagaggagctttggatctaccttctcgtaggcttccctgatctcctcctccgtgacaaggatatttccggcatcaatgtcggcaccgtcaaactttttcgtgtaggaaaaaacagccgcgtcgcggttggcgcgcacctcctcgatgatggcgttcacacgcccctcgtactccccgtaggagttcgggctgcgctttaacagattctccagtatattctgctgtgtctctttggttaacgttaagattctcatgccagatccttcctttctatctctctctttaaatccgcgatcagcttcgtgatccgttcattttccatcttcatgctgacctggttgaccaccatccgtgcagacagcggacatacttcctccagaaccaccagaccgttctcgcgcagagtcgagccggtctccacaatatcgcagatgacttccgagagcccgacgatcggcgccagctcgatggaaccgttcagcttgatgatctccaccgtctgatgctttttattgtaaaaatagtccttggcgatgtgcggatacttggttgcaacacggatcagttcatggtgcttcagcaactcttccgcatccttcggtccgcagatgcacatccggcattttccaaacccgagatccaagacttcgtagatattgcgtccctcctccagtatggtatccttcccgacaataccgatgtccgcggcgccgtattctacataagtgggcacatccggtcccttggcaaggaaaaaacgaagctttaactcctcattcacgaaaatcagctttctcgtgtccttatccttcatctcctcacaggtaatgccgatcttctcaaacagttccagtgtcttttttgcaagtctgcctttgccgagcgcaaaagtcagatatctcatatcctccatttaaaacgtctctcccttctctgccttctacgcgaaaaactgcacgtttgtcatccggctgcgagctgcataatcctcgtaatctttcctttgcttcgtctcatcccacaacatcagctccacacagcgtccggctgcacgcgctgtcgccgctgcggtaatcgccttctgccgtttggcagatttatagaccatcagctccacacagcgttccaccggaacatcaattttctgtctctgcagtgcagccatcagctggtcaatcacaaacgcaaagccgatggatgctgaatcttttccaaaacaggtgaggagccggtcgtatctgcctccctttacaatcgcctctccgcttccgaacgtatatcccgcaaatatgataccggtgtaatactggtagttgctgatcgttccaagttcaaacgaaacataacgggaaacctcatagacttccagtattttatgaagttcctccagatccccgatcgcctttaagatcctgggataggatgctgcacattcccttgcggcagaaagttcatccgaacccgtgtagagattcccgagcatgccaaagagattctttaagttctcctcgaggtttaaagtctccacgaactcctccacaccgaaaaagttcttgttggaaatgagttcgcgcagttcctcctcctgctcctccaaaagccctgccgcctccatcagtccccggaagaaatccgcatgtccgatgctaagctggaactccttaagccccgccgccttcaggcaggaaatcaccatggagatcatctccgcatccgcatccaccgatgaatctcccaaaagctccgcgccaagctgtgtacattccttcagtcgtccctgatagctgctgttattgatgaaagtattccccatgtagcacagccggatcggaagttcttcctcgccaaaatactttgcggcacagcgtgcaatcgacggcgtgatatccggtcttaacaccaacgtgttgccttcccggtcaaaaaacttgtagagatccttcgacggcgtggtgccgatctcccgtccgaatatatcaaaaaactcaaatgtcggcgtctgaatcggatgataaccgtgcagacgtaatatatgatatagctggtcctgaagaagcattttcttctcacactcatcattataaatatcccgcacaccttccggcgtatgcaataactgtcttttcatgatcgccctcatttctctgatgcttttatactttaccttgctactatggtagcatgatagcaagtgaaactctgtttattataggagatcttagaataattgtcaatccctgcgcagcaaatccttctgcagtgcatccagatacggaaccaaaacgccacgctgccgcggcaggaaatactctgggtccagttcctcatagcggaaactctttctgccgccctcctttgcgcgcttccagaactctaagagcatatccaggcgcagatagtagaactcatcccgcttcgtaaaactgagcaggaaaaaagatacccctccctgtttttcaaagttctccatgaacgcaacctgatgttcatgaatattggcaagtggaaaggtatccgtattacattcttttgcatcaaaacagaccggtattccctgtacggcgccgatatagtccaccgtgctcttctggtcaaaatacgccagcgtgatatgtctggtctgtttgtcgatattgatcggcgtgatcggtgtgggaatcttctgaatcagcgcaagaccgttctcctgataaatctcattggtacggttgataaactcttccagcgttgatccacgcagtcctcttgaattccaagttgccatattgcctccagatactctcttgacacaccggcagttagctgccgtcatgcatctttcatccttttcttttctctattatatagaattctcagtaggtacacaataaaaatatccctttgtcaaacctctccaattatgatatacttgaacccagagaggggttttacccgaagatcctagaatgaaggttagcaatgggagggatgccagatggtcatgaatgagtcaaacgagaattacctggaaacgattctggtcttaaatcatagattgggcaacgtgcgctctgtcgacatcgccaatgagatgaactttaagaagccaagcgtcagcgtggcaatgaagaatcttcgtgagaacggttatattaccgtcagcccggaaggatacatccatctgacggaaagcggacttgaagttgcagaaaagatttatgagcgccacacaatcttatccaactggctgacgatgcttggggttgatccgcgggttgccgcagaggatgcgtgcaagatcgagcacgatgtcagtgcggaaagctttgaagcgatcaagcgccacatcaattccagtgcaggaaagatttgaggcggtcagatgccacatccatttccgtacaggaaagatctgaggcggtcagacgccacatccatttccgtacaggaaagatttcatcgaaaacgacaaaaatggaagttcagcttaaggttgaacttccattttttgtgctgcaattctttctgccacaacctgtctaccggttcttacaccactcttccacgcgcgcgaactctgcgccgcagggcgcgatcacttctctcccgtccgcaaagacaatgcggtatgcgtgaagcatctgtgattttaccttacactgtctgcgaaattgttcgtttgtgccggcgtcgccgtactttacatccccgatgatcggatgtccgatggacgccaaatgcgcccggatctgatgggaacgtccggtgatcagatgaacctccagcccggtgtaaccgccgcccgtccagatgggccggtacgcggtctcaatcggcgcggcatccgcacttttgggttttaccgtactgacggtaactttattctcacgttcatccttaacgagccaccccttcaagtaatcttctctaaggacttccccttttaccacacaccggtaatacttctggatcgtccgctcctttaatgccttagacatctcctgaagtccctttaaagtctttcccgcaatcagaataccggaagtattccggtccagacggttgcagactgacggacggaaggtgcgcatctcctcctcggtcagcgctccctccctaagcagatagcttaagatatattcattggcggaaacatcctcgggtctcgccttctgggagagcatgccggacggcttgtttatgataagaatatccgcatcctcataaaggactttaagctgccttaaagtcttttctgaaccactgaaagcttctggcatcaccgtttttgactttgcccggaacttctcgtaggtctcgtccgagagaaacagcttcacctcgtccccgcaggagagcttctccgtgccgtccgcctttttgctgtttaaggtaatgtttttcttgcgcagcatcttgtagacaaaactgccgggagcctctgccagaagcttttttaaatacttgtcaaaacgctgtcccgcgtcgttctcgccgatgtgcaattcctgcatagtctctctccattcgcccgcttactttttccccgcacctgcttttttatgatgaacattgcggattgtctttttcgtatttttcttctcggaagcatttgctcttccgcggttattcccgccgcctgccgtgcggcggttcttgtcacctccagcgtagcggtctttgacgtttgttctgccgtagccgatgccccgcggccgtaccagacagtgtttgtcaaagccgatcagatccgtccgccccgctttggttaacgcctccacaacaagatcgtaattcttcgggttccggtactggatgagcgcgcgctgcatggctttctcgtgggggtttaccgccacatagaccggctgcatcgtgcgcgggtcaagtcccgtatagtacatgcaggtggatatggtcgacggggtcggataaaaatcctgtacctgctccggcatatagccgagatctcttaagaattcggcgagttccaccgcctccttcaacgtcgatcccggatgggatgacatcagatacggcaccagatactgctttttcccgagcttctcgttcatatcctgataggccttcacaaaccgcttgtacacctccacgcgcggtttgcccatcttctctaagaccgcatcggaaatatgctccggcgccacctttagctgaccgctgacgtggtgttcacagagttctctgaggaaggtgcggtcctcatcgtagatcagataatcgaaacggatacccgaacggatgaacacctttttcacattcggcagttcccgtaactttcttaagagcttcaggtaatccttatgatccacctttaagttcttgcacggtgtcggaaacaggcactgcttgttgggacatacgccctttgtcatctgcttgtcacatgcaggcgcgcggaaattggccgtcggtccgccgacatcatggatgtatcccttaaagtccggttcccagacaatcttctccgcctccgccagaatggactcgtggctgcgcacctgaataatccgcccctgatggaacgtaagcgcacagaaactgcatcctccgtagcagccgcggttgctgaccagagaaaaacgcacttcctcgattgcaggaaccccgccctgcgcttcgtaactcggatgatatgtacgctgatacggcagcgcatagacctgatccatctcgctttgtgtcagcggcttcgccggcggattctgcacgacaaaaagctttccgtcgtacgtttcaaacagacgtttggctacaaacggatcggtattgcagtactgggtataaaagctgcgcgcatacgccgccttgtccgccagcacctcctcataatgcggaagctctatggcatcatagatgtcctcacgctttctggtcttatagaccgtgccgtcgataaatgtgatatcgctgaccgccagtccgctgtttaaggcatccgcaatctccacaatgctgtgttcccccataccgtaggagatcagatccgccccggaatccagaagaatggaccgcttcatcttgttcgaccagtaatcataatgcgccagtctgcgcaggctggcctcaatgccgccgataatgatcggcgtgtgcttataggtctgccggagcagattacaatagacaatggtcgcgtaatccggccgttttcccatcacgccgcccggcgtaaacgcatccgtcgcgcgccttttcttggacaccgaatagtgattcaccatcgaatccatattgcccgcagacactaaaaacccgagccgcggctccccgaagatacagacagactccttatctctccaatccggctgcgagataattccgaccgaatagccgtgcgcttccagaagtcttgagataatggcgtgaccgaacgaaggatgatccacgtaggcatccccgatcacatagacaaagtcaaactgtttgattccgcgctcttccatctccgcacggctgactggcaaaaatccgttgttcattctaatcctcatttctcttcggctgctcattcattctttaacgcagcaagctcttccgcggtcagtttccggtacgctcccggtgcaagatcctccggcagtaccaatggtcccatggaaatccgcttcaaatacagtaccttttttccgaccgcctcaaacatccgctttacctgatggaactttccctccgtgatggtaagcgtaatctctgacacatcctctttacagcccagaattaccagatctgccggtctggtcggcttctcctccccgatgtcaaccccgtttttaaaaaagttgacatcggtctcatccaccacgccctgcacccgggcgtaatatgtttttgccacatggcgggacggcgacagcagcgcgtgtgccagcgcaccgtcgttcgtgatcaaaagcagtccctcggtgtcgagatccagccttcccaccgggaacagatctcctcttgcggtgtcgctcagataatccatcaccgtgcggtgcatattgtcctgtgtcgccgacacacagccggcgggcttgtgaaacagataatactcaaaagcggtatagagcaggcgctccccgcgcaggcatacctcatcgcctgtctcatcgaccttttgttccggcttttttgcaaccgctccgttcacggtgaccagaccggctttgatctgtttttttacctcgcttctggttcctgcgcccagttctgtcagatatttatccagacgaagtgccatttttctccctcactgtctctttgtctcaccgaatgtgtactttccctgctgttcccagagatataacaccatcggatacgggtttacggaaagttcctgcccgttctcatcgttgatatagattccaaagtgcagatgcaccggaaagttgccggtggttcccggaatatcgctgtaaccggtatcccccatatagcccagatgggtgcctgcaaggactgtctccccaacttcaaactccttcgcatactccgccagatgcgcataataaaaataggctccggacggactgcggatgccgatgcggtacccgccgaggcgaagccatcccacattttccacgactccgtcggatacgctgtatatgggatagatgcctcgctcgttcaccgaagccataatatcacagccttcatgtccccgctcaccgccaaagttcctgctctgcatccagctgtctgcaaagctcactcccgcattcccgtcggaggccaccgtcccgaccggaaaacgttccagatcgtcccacacggcagaaagatagccgcagatccgcgcatatgcctgcggctgataccgttttgcatacagagcctctacggccagctgcccgggatcggtgacgcttccatcctccgcaaaatagacggcaagcagttctttttccgacattcctttttcttctgcctcctcctgcatccgggcaagcagttccccgctcacccggtgttcccggaaactgtaaagcgccgtctcataggaaaaacagtttatctgtctggttctctccagaatccatgcgtttaaaagaacattccataggatcatggtaaacagtaacagcagcatacggacatgtctgaaattcatatcattccttttttatttacatttttttaaaaatgccaccagaagcttccatactttctcggtcgaggagatggacagacgctctttcggcgtatgaatatcgtaattgttcggtccgaacgatacacagtcaagctccttgatctttccggaaaggataccacactccagtccggcatgaattgcctcaaataccggctcctcctggaacagctcttcatatacggcactgatggtatcgcgaatctcggacttcgcctgatactcccatgcaggataatcaccgcttacggcaatctctccgcctaagaactctgcgatatgctccagacggtcacgcagatcttccttgcgggaagacacactgcttcgcacggaggatgtcgcaagaagcgcctgatcctccaattttaagatgccaagatttaaggaggtctccaccagccccggcatcaccgtgctcatatgctgtacaccgttcggcacatggcgcaggtaaaaaatcactctcgccatcgccgtataggaaagaatcgatgcctcccccttctctccgaaagcacagtcaatcgttattcccgcatccgataccgcatactcctttttaagctccgccgtaagttccttaatataggtggtaagctcctcttttttctcctccggaatcagcagacctgccgtacattcacgcggaatggcattgtcctttaaaccgccctctaaggtcacaacgcccagttccatccggtcagagacgtattttaacacacgtcccatgaccatattggcattcgcatgctctttgtcaatctcacttccggaatgtccgccgcaaagtcctgtcaccgtcagcgtcaccgcaagtccgttctgggacatacggtcaaccggaatcgtagtctccaccgtcatgccgcctgcacagctggtcaggaaatgaccctccacatcggaatcaatatttaaaagcttgtgtccctttaacatggacagatcaatcgcctcggcaccgagcattccgatctcctcgtccaccgtgatcacaacctcaaggcgcggatgcgcaatctccggcgaatccataatggcaagcgcataggcaacggcaatgccgtcatcgccgcccagcgtggttcctctcgcctttaagaaatctccgtccacgtagagatccagaccgtccttctcaaaatcgatcgcacagccgttttccttttcacataccatatccatatgtccctgcagaatgatggtatctgcctgctcatagccggctgtcgcctcctgcacgatcaccacgttgttggactcatcctgataccaggtcagatcatgcttttttgcaaaagcaaccagataatcactgatggcctttgtgttcctcgaaccgtgcggaatcgcacagatctcctcaaaataatcaaacactttctccgactgtaactgtaatgcctgtatttcttttaaactgctcatagaatcctcctgttcttcatacattctagtatgaaaaagaaattgatattcctttgtctgctattatttattgcctatatcttaaccgccccgaaagatgccgtaaacgccgcatccgtgggactcgttctatggtacacgcgcgttcttccaacgctgctcccctttgtcattctgtccaatatcctgatggactcaaattacctgcaatatctgaacaaaatcaccgcaccgcttgtatcccggctcattccggtcagcgacaacggggcttttgttctgttaagcggctttctgttcggctttccgatcgggagcaaaaactgcgccgccctgcttgcaagcggaaaaatcacacgccgggaagccgatgttttatttatcattaccaacaacatcagtccggtctttgtcacaagcttcatcctctacacccagcttgggctgtcccatctgtcggcagttaccctgctgatcctgtattttccgacgcttttgctgggcagtatcctgctctctgcagacgcacgccgcacaaaagaccgcaccgcgttccacgcgcaaaaacagccggcatctggatctcaaatgaattttaaaatcatagataccggcatcatggatggttttgaaacactgaccagacttggtgggtatattatgctgttttccatgatcgcctctctcctgcagaagcttcccgttccccgtgtcgtcacactgatccttactggaatggttgaaatcacaaacgggattgccatgcttccggattcgggtctgccgcagtccgttcagtatgtgctggctgtggtctataccgccttcggcggactgtccggcatcgcccagacaagttccatgatccgcgacacaccactctccataaaacgctactgcatcgcaaaactgcttcttgctgcctgctgcggactgcttgcctgtctcgtctcacagatctttcatctgtgagacagtgcgtccagtcagcccagcatatccgaagagatctccaccttcggaccgtctacctgggatgcctgcgcatccgtcgtcttggtctccggctcctcggcagtcggattgagctcggcacggttcgccgtcactacatccaggaatccctgcagggaacttacataagcatcatggcgcgccttcgccgcatccatggaatgtgagatcgtgttctccagattccgcagaatgtcatccgtatactgcatggcacccatacggatattgttggcgtcattcgttgcattatcgagaatctcctgtgcctgcttggttgcaatcatgaccacttcattcgcctgcgcatatgcctgctgcatgatctgatgctcgctgaccagctcgtccgtcttgacctgcgcctgtgcgatgatcgcatctgcctttgcctgggcatctgccagaattgcttccttattgcttatgatcttctgatagcgtttgatctcctccggtgtcttgatgcggagttcgttgagcagctcctccatctcttcgcggtttacgataattttagaagaggaaaatgtctgcggcttgcagccatcgatatactcctcgatttcttctataatctgttcaattctacttgccataagcctctccttattttgagatgtgatatttctcatagatcctgtctatgaatctcgccggaacgaacttggagatgtcgcctccgtaggatgcgaactccttcacaatggtggaactcagataggaatactgcaggctcgtcgtgagaaaaatcgtctccacttccggattctccacatgattcgtctgtgcaatctgaagctcgtattcaaaatccgtcacagcccgaagcccacgcactatgatcgtcgcgttgatctccttcatatagtctaccaaaagaccgtcaaaagatgcaaccgtgacattcggcatggattccgtcatctcttttatcatactaacacgttcgtcaagagaaaacaacgaattttttgcgctgttattcagtacgccgaccaccagttcatccacgatttttgcggatctcttaatcatatccagatgtcccagtgtaagcggatcaaaacttccgggatatattgccctcttcataggtttcttctccttttcgcatgctccggctattttctgcggataaatgcgtgctcatttgtcttgtacatcttgaggcgtgaaagtgtcattccatactcatccagatagctgaaatccgtatctaacgcagcctctacgatcagaaccgtgtcctcttttaaaagggaagatcctgcaagataccgtaaaacctcctgctccattcccttgcggtaaggcgggtccatgaaaatcaggtcaaactgatatttgccctccatggcgcgcagcgcgctcaacacttccgtcggatacagctttgtctgatgttcaaacttcgtaaaccggatattctcctcgatgcaggctgccggctttttgccattgtcgacaaacaccgcatagcgcgcgcctctgctgactgcctccaatcccatctgaccgcttcccgcaaacagatccaggaaatatgccccgggcacttcatcctgtatgatattaaacagcgtctccttgatccggtccgtggtcggtctcgtatccattccctccggtgccttaagcggcaggcttctcgccgttccagctatgattcgcatatggttccctcctctgtgatcgtgcgggcaagtaaatgaagcgccgcatctgtggcacttttccgcacctgcatccggtctcccgcaaacagatgccgttccgtgacaacccttccgtgcaggcagcagccgatgtagacaagcccgaccggacattccctggttccgccgtccggtcctgccacgccggtcacagacagcgccgcatccgtatccgccgtccgcgccgcagataccgccatatccgcagccgtctcggcactcacaacgccgtagcgctcaatcgtctccggcttcacatggatcatcttcaccttcgcttcgtttgaataggtgacatatccctccgtaaaaaatgcggagatccccggcacattgataagcgttgaggcaatcatcccgccggtcgcggactctgctgtcgtgagcgtataatgatatttttttaacaattcaaaaatccgatactccgacatttcatcaagcatcttgctgccgttctgtccctctgctgccatcttttcttccttctctatttctggtcttttaagacgtctttgttcttcacaatgtaatcgatcagagataccacggtcagaatcagcgccacatacgtcagcacggtgccgagaatctggaagaacggcatctggatgtcaaggatcagaacaatcaccatcagcatctggaacgttgtcttgaactttccccagtagcttgctgcgatcacaaccccgttgtcggatgccaccagacggaaaccgctgatgataaattctctcgcaatgatcacaatcacaatccatgccgccaggcggtcaagctcgatcagacagatcatggcagagcacaccagaagtttatctgccagcgggtccataaatttgccgaaatttgtcacaagattgtactttcttgcaatcttgccgtccagcatatccgtcaggctcgccacgataaagatcgccactgcaatatagttgccgtatgccgggaaataaggcgacagcagaaagaatacaaaaaacggaatcaaaattacacgcataatggttaatttgtttggtaaattcataacaattctcctatcaaatcatactcgtacgctcctgtcactctggcgcgtacaatatcaccggtcatcagttcctcgtccgtgttgatgaaaatgtagccgtccacatccggcgcatcgcggtaggtgcggccgatataggcattctcatcgctcacttttccttcgataaagacataaagctctctgcccttcatctcctcgttcttgtcgaagatgatctcctcctgcagttccatgacatccgcctgccactcgttcttcgtctcctcgtcaatctgatccgggaactccgccgcaggtgttccctcctccggagagtaggtgaaagctccgagtctgtcgaactccatatcattgataaactgcatcagctcctcgtgcatctccttcgtctctcccggaaatccgcagataagcgttgtccggagcgtgatgtccggaatccgctctctcaaatgcgtgataatgcgcacaagatccgcgttgctggtgcgtctgcccatccgctttaacatggtatcgttggcgtgctggatcggcagatccaggtagtgacagactttctcattgcgggcaatggcgtcaatcagctcctcatagatctcctccggatagcagtacataatgcggatccagaacagtcccggaatctcatttaacgcatccagcagcttgtggagggacttctccccgtagagatccacgccgtaaagcgtcgtctcctgcgccactaaaatcagttccttcgcgcctgccgccaccagctccttcgcctgtgccaccagctcctccatcggaacactgcggtaattgccgcggatatacggaataatgcagtaggtgcagcgcttgttgcagccctccgcaatctttaggtaagcaaagtgtccgcccgtcgtcacgctccgcttggctgtaagcttcggcagtccctccagcgtctcaaaattctcgtagaacttgccgcccagcgcctccgttatggcattcacgatatcttcgtaggaattggttccaaggatcgcatccacctccggaatctccttgcggatctcttccttgtagcgctgcgccaggcatccggtcacgatcagcgcctttaactttgcatcgcgcttgtgctccgccatctccaaaatggtgttgatgctctcttccttcgcatcgttgataaagcagcaggtgttgatgatgatgatatccgcctgatattcatcatcggtcatctcgatcggctgtccgtcaaatgtgccggcatcccggatcattccaagcatgaattccgtatctaccagattcttgtcacagccaagggatataaataataacttcatcgttgtctccatcattgtattttaacgccaaaaaggatgataagcatatcatccttttcccatctgaaactatctgaaaaaatgattactcttcctcggactgtgactccggaataatctttaccttgccctcataaagttcttccacggcaatggataacggcttcgggcaggtgactttatctgccatcggctcatctccggcgatgatctggcgtgcgcgctttgcagctgcaatcaccagggaatagcggctgtttaccaccggttcctcaccgatctctacgccctcgttgactaccttcattaactctacataagatggatgtatcataataaatctcctttctgacgccctgttactgacgcgtgaagcctttcagctcgtttctcatttcacggattttgtctgcattgcgcgctacgcggtagtgctcattctggatgatctcatgcacttccctgaccgcttcctccagcacatcgttgactaccagatagtcgtattcctccagcccttcggcttcttctaacgcgcgtgccagccggtgttcaatgacgtccatggtctctgttccacggccgatcagccggttcttcaacacttccgcgctcggcggagtcacaaacaaaagcagcgcatccgggaactgtctgcgtacctttaaggcaccctgaatctcaatctccaagatcacgtccttgcccctggcaagctgctcttccacatatgccttcggtgtgccgtaatagttgcccacatactctgcatattccacaagcgcatcgtccgcgatcatctgctcaaacgcttcgcggctcttgaaaaaatactcgataccgtcgcgctccccggttcgcggtgcgcgcgtcgtcgcggaaatcgagagcgcgtaggtctcgctgtgtgcctgcatgagcgccttcatgatcgtaccttttcccgcaccggaaaaccccgatacgactgtcaaaattcctttattcttttgcatcgtcataatcctctgcggtattgccgttaaatcttcctgccagtgtctccggctgcaatgccgacaatataattttattattttcggtaaagatcacactcttggtgcgtctgccctgtgtcgcatcgattaacgtctccgtctccttgccgcgctgtatcagccgctttgccggagcggaatccgacgagatgatgcttatgatcttatcggtgttgaccatattgccaaagccgatgttgattaacccagccatggacgccacctactcaatgttctgaatctgctcacgaaccttctcgatgtccgtcttcagattgatgccgacgtccgaaaccttaagatcggtcgtctttgagaggatggtgttcgcctcgcggttcatctcctgcgcaataaagtcaagctttctgcccatgccgccgccggcaagcagggtctccttcatgcttaagatatggcttctgagacgcaccgtctcttcatccacgcagatcttgtcggcaaaaatagtaatctccgccgcaattcttgcatcgtcgagctgcctgtcgcctaaaagctcctgcactttgctctccagccgcatgcggtactcgtccaggatctgcggcgagcgctcctcaatgtaatccacataggaaatcatgccgtcaagcttctccacgagatccgtcctaagacgctctccctctttgatacggctctccacaaactgcgctgccgcctggcggagcgcctgctccaatcccgcccaaagcttctgctcatccgggctctgctcctccatcacgaagacgtccggatagtgggacaacgtgctcacgcgcacgtcattctcgatgccgaactgctctgccatctccttcagataggtcatgtactgctctgcaagccccgcattgtattttaacgaataattctcttctgtgtaatcttcataagatataaatacatccaccttgccgcgctcgatatattcctttaacagactgcggatcgcactctcaaagaaattcagcgtcttcggcagcttgatattcacatccagataacggtgattcacggacttgatctccacggtaaacttgcggcttgcatccgcaacctccgcgcgcccgaaaccggtcatgctcttaatcattcactgtctccctaacatgatagcttctgatgctaattcgatttattataaatcgaatccggtttgaagtcaagagccgcaaaatgattccttacgacatggcagcaattctctatgacatacaggtgccgcatggcatgccatgcggtgtgtcatgcggcatatcgtgccgtttaggcatgtgtctcctgctcgtagggcatcacttccgccagaaagccctttttctgcagtgcatgctctatctcgtcgagcacttcttcgctttccgcggaaatcttgtgaaaatgatagccggaagtcacattcaaaagcggaaccgattttccggttctaagatcatttaagaagccctgcacatcccgccggttcctgatattgagtgccgcttccacgcgcccgtaaaccctgtggttcaccatgacatttaagacggtgccgcccagatcaacgatcgtcgtgagttcctcctcaacctgttcattggtatggcagaccttaagcacgcgggtcgcacatttcggttcgttgagcagatagcccttcgcggtcgacacaatcggatacccttctgttctaagcagcgcaatgtcctgcaccacgacctgccggctcacccccgtgacctgtccaagctgcgtcccggagagcggctgttccgactcccgcatcagaaagatcagtttttttcttctgtccgcaccggtcatttctttttccatagattttctcacccttccagcacacgcaaatgtttcagactgatatccaggatcggcgcagaatgtgtcagcgcgccgctggacacgtaatccacaccaagagatgtaatggtcttaatattttcctttgtgatattgccggaacactcggtctcggcacgtccgtcgatcacgcggattgcttccgccatctgctccggtgtcatattgtcaagcatgataatatccgcgcctgcttccacggcttcttttaccatatcaaggttctctgtctccacctcgatcttgcgcacaaacggtgcatatgcctttgctgccgccacggcttccttcacgccgcctgccgcatcgatgtgattgtcctttaagagcacgccgtccgacagattatatctgtgattgcatccgccgccgatgcgcaccgcatatttttcaaaaatacgcatgcccggcgttgttttgcgggtatccagaagcttcgtcttagatccctccagaagcttcgccacgctgtgcgtgtaagttgcaatgccgcttaagcgctgcagatagttgagtgccgtgcgctctcccgacagcagtacccggatatcgccggtcacaaccgcaagggtctgtccctttttcactttctcgccatccttcacgaagaactccacctgcgtcttttcatccagcagtgtgaacacacgctcgaaaatctgtaaacccgcaataattccgtcctccttgcagatcaactgtacgtcgccctttttgtactccggcatcacggcgttggtggagacatcctcactgttgatgtcctcctctaacgccatcttgatatatttgtcagcaacaagctgcatggtaattggattcatgttcttcttttcctttctgtgtaagttcgatcttttgtgcggcgcgctttgcaaaaacaaggctctccaggagactgttgctggcaagccggttcttcccgtgaaccccgttgcagcttgtctccccgaccgcatacagatgcggcatagtcgtttccgaatcgcggtccacatggacgccgcccataaaatagtgctgtgccggaacgatcggtgccggctcctttaagatgtcatagccctcttccagacatttctcataaatatgtgggaaatgtcccttgatgatctcctccggtacgttctcaaaggagatgaattcatggtcgacaccctctttttccatctcctcgcggatcgctttcgtcacgacatcgcgcggaagcagttcgttgacgaaccgctctcccttgtgattcaagagaatcgcgccctcgcctctggcggactctgagatcagaaagcttctgcccggctttttgctgtagagacaggtcggatggatctgcacataatccatgtgctccaattctactccgtgctgctccgcaatccggcaggcatcgcccgtcagaatcgggaaattcgtggagtgctcatacagaccgccgatgccgcctgtcgccatgaccgtatcctgcgcatggatgtgcagcgtctcgccgtcccttgtcttcgcgatcatgccgcagcagtgatcattcacgacgagaatatctgtcattacagtatattccatgatggtcacattcgtcaattttttcacatgcgaaagcagcgtcgtggtgatctccttgccggtgatatcctcatggaaacagattctcggtctggaatgtgctccctctctcgtgtaggcaagcgtgccatccggattcttcgcaaaacgaaccccgagggaaagcagatcatcgatgatcgcccggcttccgcggatcatgagatccacgctctccttccggttctcataatgtcccgcccgcatggtatcctcaaaataggaatcatagtcgttctcatcatgcagcacacagatgcctccctgtgccagcatggaatcacagctctccagatcttctttggacagcatcagaatcttcttgtctcttccaagacgcagcgccgtatacagccctgccactccgcagcctgcaatcactacgtcatagtacatatctctcatcttatttattccctcttttcgtatcccggcatctgatacgccggtcacatttcatccgagtatagcacatatctttacagatgacaagacagttgttatgacaaattgtcaagacaatttgtcagacaatttgtcatgtataattccaaaataaaaaagacatattatcgaaaagggatgccgtcgcttcagaccaggttcccaaaaggagacaactatgattaacgaagataccatttatctgctgcgcgagtgcaacgccggaacgcagatggcagtctattccatcggcgagattctggaaaatgtcaaagatcagaagctgcgtgagattctgatctcatccaaaaaccatcacgaacagcttggcaacgaactgcatattctgctgcagaaatacggcgatacgacaaaagacccgggcgtcatcgccaagggcatgtcctggatcaaaacgaacgcaaaacttgccatcgacgacagtgaccgggtctgtgcagatctgattacggacggctgccacatgggcaccaagacaatgcagcggcacatcaaccagtacctcgccgctgaccgcgaggccagaggcaaggcagaagaactcatccgcatggaagaactgctcgcatgcgaactgaaaccgtttttatagacagaaaaaccctgcgccgcatccggaatttacaccagaaactcccggattttttccagcacattttccgtctcatcatagatggaaagtgtgagcggcacagtaagatccattgtgcagattcccagaattgacttgccgtccaccgtgtaactgccccgcccaagatcaaacggtccctcgcaggcacttaggatattgcagaatcttagtgcgcgctccggcgcattcagcagcacttctacctgtttcacgaataccatacctcctgtttcttttatggtatagtattccagactttccgctgccgtaatcaatcatttacatctttttgctagatcagtgtctcgatctcgtcgagcacttttccgaatacatcgagtgcatcctgaatcggcttcggctcctccatattgatgccgacctgttttaacagatctaccggagacatggagcatccgccggagaggaacttcttgtagcgctccactgccggtgcgccctcctcgagaatgccgtgcgcgatcgccaccgctgcagaaaagctggtcgcatactggtatacatagaaattatagtaaaaatgcgggattcttgcccactcataagcgatctgcggatcggagaccatatcctcgccaaaatacttctggttcagttcgtaatagagtttgcagagattctcagcatttaagctttcgccctcttccgccatctggttgcttttcatctcgaactccgcgaacatggtctggcggtacactgttcccttaaagctgtcgagataatgatttaacaggtaggcacgctcttttttgtccgtcgtgttcgcgagcagatactccatcagaaggatctcgttgcaggtagaggcaacctccgccacgaaaatcttgtactgggagtaaatataaggctgatttgcattcgagtaccaggaatgcatggcatgtcccatctcgtgtgcgagcgtaaacatgttatctaacgtatcgttataattcaacaggacatacgggtgcgtgccgaacgcgcctgccgagtatgcgccgctccgctttccctcgttctcatagacatcgatccagcggttctcaaagccttcctttaccgttgcaacgtagtcctcaccaagaggtgcgagcgccttaagcaccgtctccttcgcctcatcgtaggaaacctttttggctgcatccgcgatcatcggcgtgtagacgtcatacatgtgaagttcgtccaccccgaggcacttcttgcgcagctttacatagcggtgcatcttgtccatgttggcgttcacagtctccacaagattgcggtaaaccttcgacggcacgttgttcgcatcgactgccgcctccagcgtggacgcataatttctcgcctttgcatagaaaatctgctgctttacctgtccgttataaagccctgcaatcgttcctgcaaactgcttgtagatgctgtaaaatgcctcaaacgcatcctttcttacgcggcggtcgcctgattcctcgaacggaacaaagttgccgtgggacaggcgcaccttctccccgttttcatcctcgatctccgggtagatcagatccgcattgttaatgatggagtatacctgctccggcgtctgtgccatctctccggtcatcgccaccagtttttccatctccgccgagaggacatgctctttggtgcgcaggatctcatctaccagtccgcggtagagttccagttcctttttttcagcaaaatactgcgcaagcgttgctttgtcggctgccagaatctccggcacaacaaatgccgtgcggctctgataatccgtcacaacaccgtacattttctgcgacattgcctgatgctcggtgttcttctgatcctggtcaaacaggcgctccgcataattaaacgccagatcgatcttctgctctgcgcgcgcgccaagctccagcgccgtaagaagcttctctgcggaagccataacactgccctctaactttgcgagatcagaaacgatcgtaactacttccttaagatctgcctcccatgctgctttggaagcatacattgcacttacatcccatgtatattcctcttttacctcacttctttttggtaattctcttgccatagataacctcctgtccggtgtccccgttttcggtcgcaccgcataaaataagggatataaaaatccctctcttaatttaccttcccaaagccgaattgtaaagacccagtttgttttttctaactccccgactcctctttccatttgtattttgcagcgttttctactataatggattcacattatttatgaaggagtacaaacatcatggcttttgacggatttgtcatatccaatttagtatacgaattaaacaacacgattctgaatgccaaaatcagcaaaatcgcgcagccggaaaccgacgagctgctcttcaccttaaaaggatctaacggtcagtaccgccttgccatgtcggcgagcgcttccctgccgtttttatatctgaccggcaccaacaaaccgagtccgctcaccgcgccgaatttctgcatgcttctgcgcaagcatatcgcaaacggacggatcgtggagatcagccagccgcacatggagcgcatcatcaacttcaagatcgagcacttggacgagatgggcgacctgtgtcagaaaaccctgatcgtggagctgatgggcaagcggagcaatatcattttctgcgatgcgaacggcagaatcatcgacagcatcaaacacgtatcggctgcgatgagttctctgcgtgaagttctgccgggacgcacctactgcattcccgcaacgcaggatgaccgtctgaatccgttggaggtcacggaggagacttttttgggcagcgccatgaaaaagccgcttccgatcgcaaaggcgctctacacctcctttaccggtgtcagccccctcgtcgctaacgaaatctgccaccgcgcctccatcgacggcgacatgtccgtggattcgcttaccccggatgcccaaaagcatctctatcacaactttgcctggctgatggagaacgtaaaagagcaccgctacgagccgaacatcattacccgcgacagggagccggtcgaattttcctgcttccgtctgaccgaatatgtcggcagcgacgatgccgcggaagccacaaattccaccggtgccgctgcaaacggaagcgaatacacgatgcagcacttttcttcgatctcagcggtcctggaacagtattacgcttcacgcaacgtctacacgcgcatccggcagaagtccgtcgacctgcgccggattgtcgccaccgccttagaccgcagccgcaagaaataccagctgcaggaaaagcagttaaaggacaccgaaaagcgcgacaggtacaaagtctacggcgaactgatccacacttacggctatggacttgcggagggcgcaaaggaactggaggcgctcaattactacaccaacgagatgatcaaaattccgctcgacccgatgcttgacgccaaggcgaatgcccagaaatatttcgacaaatacaataagttaaagcgcacgtatgaagccctcacggatctgaccgcggagacacgcgccgagatcgagcacctagagagcatcgcaacctcgctcgatattgcactcacggaagacgatctcgtgcagatcaaggaagagctgatcgaatacggctatatccgcaggaagcgcaccgacaagaaggccaagagtaagagcaaaccgttccactaccgctcctccgacgggtatgacatctatgtcgggaagaacaattaccagaacgaggaactgacgtttaaatttgccaccggcaacgactggtggtttcacgccaaaggaatgcccggctcccacgtcatcgtaaaatccggcaacgacgaactgccggaccgcgtctttgaggaagccggaaaactcgccggttattattccaaaggcagggacaacgacaagattgagattgactatctccagaaaaagaacgtaaaaaagccgaacggcagcgcgcccggctttgttgtatactataccaattattctctgaccattcacccggacatctccgggctgaccctgatcgagtaaaagcgccctaggcttcgatcagtcctgctctgcgcatctcagtataagcgagcaggaacgggccgacgccctttgcatcatcttttaccaccggctccgacatataataatcgtaggtgccggagcgcatctgttttccgccaagtccggcaactaagcagatgccgtccaagtgcaggcttccgtccgcatcctcggagagatatttctcacagatgccgtggaatgcctttgcaccgtatgtctgatagttctccggcagaaagcccaggcgcacacccttaagcagcgcgtatgccatgatcgagcttccgctggtctccagataattcttctccatgcctccaaaattcacaacctgataccacatgccgctggcgtcctgatactttaacatggcgtccatcagatccacaaacaccttcttcaggcgctcatacggctctcccaccgacgcatccgccttgtccaacgtgtcaagaagcgccatggaataccatccgagcgcacgcagccagaaattctggcttaaccccgtcaccttgtcgcaccagaacatctctctggaagaatcataagcatgatagtacagtccggtcttcggatcgcgcatatgctccaccacattgaaaaactggcggaaaatatcgtcataattcttcttctcatgaaatctcgtctcatactccatataaaacggctgacacatatacagtccgtccagccagacctgattcgggtaaatattcttgtgccagaaatttccctctgccgtgcgcggcatctgctcaatctggctgtatacaagatcgatcgccttccggtatttttcttttccggtcagatcgtagagctcaaacagggtttttcccgcattgacattgtcaatatttaattcttctaccgaatagccctcaatcgatccgtcctctctgaccttgcagtcgataaagttgtcggcaaagcgaaaatatttctcgtcttttgtgatcgcgtacatttcaagaatcgccttgatcatgcatccgtctatgtaattccaggtggactttaagccctgcagaatcttctcaatattccagatcgggcgatccggggtactcttctccagtaattcgtcaatatagatttctattttgtccatgttctgctcctttatctcggggatttttcaaaaaacatccccttgattatagaagaatttcggaaactatgcaatagatatccctctcttttccccgggcggatgtcactcgacattttttaatgcctgatccatcggaattttcctgatccgcataaagtcaaacaccatcacgatcagataaccgatcagaacaaacgcgaacattttcacatagcccgccggaagaatgacaaaagaaaaccatccgctgtaactgtacatgatcactttccaggcggcattcatcacgagcgcgccaagcaccacgcagattgcatccgccacgatcacaacaatcgtggtcgacagcagataaatgctagcaatctcccggttctcatagcctaagatctttgtcatggaaattgccgtctcattcttctcaatgatgatctttgtgagaagataaattaacaccgcagacagcaggatgcataagatctggaaatagctcatatacgatcccatcgagtgatccagctgatcgcacattttcgtgatgtcctgctccgtaattaccgtcgcgatattttcctccgcaatgtccgtaatctccgtgtctgagaaatagccgccaaacgcatccgcatcctgctcaaatacctcccggtaattttcaatcggcagaaatacggcaatgctctgggacttgtcaaaaatgcccgccacccggaaggtatactgctgattctcgtacttttcatccagtgtgatctcgtcgcccacatccacatcgtatttgtctgcataggaggcggaaatatatgcctcgttctcttttaagtgattaagatcgtcgatcttcacatactgactgttatcagaaataccgtagacggatacctcctcgtcaagtgtatcactcttccttaagagagaggtcatgctgaatttttccgcatccggctcctttgtcgtgatgatgtcaccgtcctcatcctcccaggacgcaagcatatactgatactttgcgaacatcagatccttggcgttctccttatagtagccgagcgtatccggcatgccgaccgccatcgccagcatgaccatgcagaaaaatatcccgacaaaaaggaccgcataatttgccatattctgaaacatgacgcgcagacggaaacggctcaaaaactgaaaccgcggcaggcgcatcgcctttttacactttgtcttctttaaatcatgccgcaaaaactgtaacggcgtatggcgcatcatccgcgcaatcaccacaaggttcacaacaaacatcagaatcagcggaatcagcgtcgtcttgataaacgcatccggattccatatcgtctcgtaggtcggaagactgtagctgttatagtacatcgaaaccacaacatttttgaacaccgtatatccgagaatgtttccgatcagcgccgcgacgagcgtcacaatgaccggcatcgacagataatgcgccaccagttccccgcgcgtgtaacccgaagcgcggagtgttccgatcgtggacgactccctggctatcgtattgctgattgtaatggcaaaaataaaagcgataatcacaatcagaatatcgagcagcacaccgcccatcgcctcgtcagatcccatatcatccgtcgcaaaatgaatggcagggttcgcatattccggtacataatcctcaagctccgcatccgcgacaaccacctgcgtcagcagggctttcataaaatcatccgacagatttttttctgctgcctcatccgccggctctgtcacatagttccatgcataatcatagtgcaccttctcgtgcaggcgcgcaaatccgtcttccgtcaccatcgccacattgaattttagcgcgtcaaacatcagatccgtacttttttcatgcagtgtggcatagttgacataggcgatcagtcccacgacacgatacgcctctccttggaccgttatggtatctcccaccgcaatgccgacattgtccgcatgcatgcggtccaccacaatctcatcggaagatgccgggaagcttccttccatcagacatgccagattgatgtcatctgtcttctgatagacgcggacggttccgtccgaggtgccgtcgccgtcgtgatcctcctcctcattgcgatagaaattctcggatatatttaccggtaccgccgcaaaatcaggatcgttcaattcatatttgtcttccgccttttgatatttttcgtcaatttcatccagaatcttgtcccaggcttcgtcgtaagccttctcgtacgcctcgtcatgtgccttcccatacgcctcgtcataggcggtatcgtaggctttctgatacgcgctctcgtaagcggcatcgtagacctgctgataacttcccgcctgctttgcctgcgccaccgccgtatctagcatcgctgcagccatggtctcatccatcccctgtgccagcagtgtctgttttacctgcgtcgcaaatgtctggtcgaactgtgtctgaaattccgcattgaatttgcggtcaaattcctccttgaactggctgtcgaattcgtccttgaacttgtcctcaaattcaccgtcaaacttctcatccagctcacgctttgccttgtccgtgtaatactgctttacatccgctttctctcccgtggcaatcgcagcgagcagtgtctgatccgcctcctcattcagttcaaaatgtccgtcctccagcttatatttcgtgactccctcatctgcagccttcatcatgctctcgttggcaacgtacattcccgatacaaagccgattgtcaaaatgaggaacaggctcacgagcagatattttctccagtctcccgccagttccctcggtatgcgtctgatcagcggatttcttgtctttttcttcttcatgccggtcacactccttaccattccagatctgccgctgaaactttatccgtgttgatctcattgtgacgtacttccccgtcgcgcagcttgatcacatgatctgccatatgccggatcgcctcattgtgcgtaaccataataaccgtattgccgtattttatattcacatcctcgatcagctttaagatctctttggacgtatgataatcgagtgcgcccgtcggctcatcgcagagcagaatatccgggttcttgacgatcgcccttccgatggatactctctgctgctgaccgccggagagctgattcgggagcttgtatctgtgctcataaagtcccagcgtatgtaacagttcatcaatatccagcgcatgatcggacagatacgcgccgacctcgatattttcctttacgttcagattcccgatcaggttatacatctgaaagacataaccgagatgcttgcgccggtattgcgttagtttcttctcactcatctcctccaacttatcaccgccgatcgagatataaccggaatccgcactgtcaatgcctccgataatattgagcagcgtcgatttcccggagccggacggtccgagcagcacgcagaactctcccttcgccacggaaaagttcatcccgcgcagtacctcctgccgtgtctcgccgcttccaaatccctttttcagatcaacaatttccagaaatttcttttcttcctccgacataatctcctctttccggaacatccccatgcaggaatattcctgtttcctttttgcaggcagccgttagttttaactaacttttttcacattatatcatagtcccgcaagattgcaagagccaaaccgcagggaagcctgtacaaaaaatggaagctttttcctgtttttttgacaaaaactgcatgtttatctctcttaaattctcacatactattcctgaacaaacgcagatggcgcaagttcagacgaagtctgtgacccaaaagtctaagacagacaaagtgatcataacaatgataacaaaggatcattaacacaccaaaggaggaaacaatcatggcaaatcgttcatctaacagagcagcaatccctgaggcaaaaagtgcactggaccgcttcaagtacgaagtggcgagcgagatcggcgtgccgttaaaggacggctacaacggagatcttacctccagacagaatggttctgtcggcggttatatggtcaagaaaatgattgaggcacaggaaaagcagatggcaggcaagtaacccgcccgctgcagacattccgagaaagagaaaaaataccaaagaaaaagacgggaccggcgcttgcaccggtcccgttttatgtgtgaaattataagctcatctgattctgttcccgcataaggaaagcttcgagataatgccgcaggttctcatgctcaccgaatataagatccggatcttctgcaagcagttcgccgaccgcctccgatgcatcccgcagcacggcagcatcctgatagatgtcgccaagtgcaaactgcagttcgccggactgacggatcccgaagaaatcccccggcccccgcagttttaagtcctcgcttgcaatccgaaatccgtcattggaatcatttaagatcttaagtctgcgctccgccgtctttgcgctcgaacagttgaccataatacagtaggactgcgcatcgcctcttcccacacggccgcggagctggtgaagctgcgccaggccgaaccgctccgcattttcgatcatcatgaccgtggcattcggcacattgacgccgacttccacgaccgtggtcgccaccagcacctgcacctcatttttcataaatgcctccatgactttgttcttctgcgccggcttcatctgaccgtgcagcagtccgagctggatctcctccgggaaaatctgccggagttttttgacgtagtccgtggcattctccgtctccataccctcgacttcctccaccagaggacagatcacgtatgcctgatgcccgtttttgacctcattttcgataaatgcatacgccttgttccgatagcccgtattgaccacgcagtttttgaccggaagacgctttgcaggcacctcatccaccaccgagatgtccagatccccatataggataatggcgagcgttctggggatcggtgtggcgctcatcaccagaatatgcggatgtctgcccttttccgcaaatatttcccgctggcggacgccgaagcggtgctgctcatccgtgatgacgagcgccaggttatcgtagatggcgcgctcctggatcagcgcgtgtgttccgaccaccatcgcattgggataaagctgcagcgcctcgtatgccatgcgcttctgacgcgccgtcatggagccggtgagaagcaccaccggaatctttaatccaaactcttcgcacagcttctgaaacgtctcatagtgctgtctggcaagcacttccgtcggcgccatgatcgccgactggtaatcattgtgcgcggcatctgccatcgccaggaacgctatgatcgtctttccggaaccgacatctccctgaatcagccgctgcatgacataagggcttcgcatatcgcgcttcacttccgagagcgcccgcttctgcgcgccggtcagctcatacggcagcctggcaatcagctcatcggtaaaggaatcctcccggaattcaaattcgttggcttccttgatccgcttctccttgtggtactgcatatttaaaataaagaggaaaaactcatcgaacacgagacggttgcgcgccgcgatcagcgtgtccatattttccggaaaatgaatctctttgatcgcataattgtactcgcagagtttgtagcggctgcggatctcccggggcagatattccttaaacagttcttctctgccgagcaccgagcgcacggtctttgtgaccagattgttcgagattcctccggtcagaccatacaccggcaaaaatgcctgctccatggcggcgtacgattccccggaatagatggctgcctgctccatcacaagacggctgcctttgcgcgccactttcccgtagaatacataggtattgcccggtgcaagctgacttttgatgtatggcatccgaaaccacaccagttcaagttccgcctcatccgtgccgatggtcgtcaccgtgaccggcatgcttctcgtgcgtctcacaacgggtgtctttctcaccctgccgagtaccgccgccgtctcgccgtccgtgacctccgccacctcttttgctaccgggaactgcacatacgtcctcggataatgaagtagcagatcccccaccgtttcgatatttaatttctggaacagggcggctgtcttttccccgattcccttgatctctattatggatgtactctgattcatactctgtttcctttagaaaaaggctgccgcaccgtcaaccgcctcaagcgatgtccgtgcagcagccctgcctgtgcttatgttatttacacttttcgtcttactcgacggagatcacgtaataatagatcggctgtccgccatagtggacttccacctcgacatccggatgcgcctctgtgatcttttcaccgatcgcattcgctgcatcttccctggcatcctccccgtagtagatgctgacaatcgccgaatcctcatcgatgagctgttcgatcatatccaacaccgtagcctcaagctccttcccaacggcaaggattccctgatcgccgatgcccataaaatcatcctgcttgatctccttgtcatcgatcacggtatcgcgcaccgcataggtcacctgaccggtctttaccgtgccaagctcctcgctcatgcgctctgcattctcctccggtgtgctgtccggaatatagttgatgagcgccgtgattccctgcgggatcgtcttggtcgggatcacgatgatctttttgtcctccacaagagaggctgcctgattggctgcgagaataatattcttgttattcggaagaataaagatattcttcgcgttcactttttcgatggcgtttaacatatcctcggtgctcgggttcatcgtctgaccgccctcgataatgtagtccacgccaagtccctgaaagatctcattgataccgtcgccgatgctgacagagataaagcccatctccttcggcggttcctgctcttttggagcctcctcgcccttcagctgcttctccacgtcctcgatagtctccgactgcatctccttttccttgagtgcagagatcttctcgtcacgctctaacttcatattctcaatgatgatcgtcgtaaggcttccgtaagtcagtccccgctgcattgcaagtcccggatcgttcgtgtgcacatgcacctttacaatctcgtcatcagcgacaacaacgatcgaatcaccgatgctctctaagtactctttgaactccgtctcctgtcttgtggaaatcggcttctccaacataatcaaaaactgggtacagtacgcaaacttgatctcctgtgctgcctgtgcatcaatattgtaggaagcacttcccgtctcggccgccggctgcttctccggtgtctcaatcgagtaatcgatctccttgccctgcagggagtcaagcgcacccttcatcacctgcatcagaccctgtccgccggaatccacaactcccgcctgttttaataccggaagcatatccggcgtcatgctaaggacatgatcgccctctttgatgacttcctcgcagaacgcaagcagatcggtcgtctcctcctcgctcagctctaccgcacgtaccgccatccctttggcaaccgtaagaatcgtaccttccttcggcttcataaccgccttgtatgcggtctctactgccttctcaaacgcatcggacaatacctgcacgtcaatctcatcatactctgcaataaccttggtaaacccgcgaaacagctgggaaagaatgacgccggaattacctctcgctccgcggagggaaccggaggaaattgcctttgcaagcgacttcatgtccggctctgccatcgccgccacttccttcgcggcagacatgatcgtcatcgacatgttggtaccggtatctccatctggaaccgggaatacattcagttcgttgatccactctttctttgcttccaagtttttcgctccggccagaaacgcttttgcgagagcctcggcatttatcgtagtgatctccacctcaaaaatcctccttaatcaatcactcgtacgccttcgacgtagatgttcattttcttaatttccattccggtaaacgcctcgaccttatattttaccgtctcgatcagattatcggataccgtgatgatgctgacgccgtaagatacgatcacatgaaaatcgatcgtgatcttgttctcctcatcaatgacgacattgatgccgtgcgtgagataatccttctttaaaagcttcaccagaccgtccttcatgttgactgcagccataccgacaattccaaaacattccactgcaaccgatcctgcatacgttgcgatcacttccggatctattgtaaccttgcccaactgggtctccatatgtccattcatataatacgatgctcctttcaaagccatattaacgctagtttattgctattataaccgctttttgcacaaattcatagccctgttttttgaattttatattttttttaaattttgcttgcaatatgtactttcttctgatagaataatcatgttgtgagcctgtatgctatacaggttttacctgtagaatgtgcgggcaagtcctgcatcaccaggataaaatatgcaaggaggtgcaaaatcatggcaaaatgtgcagtttgtggaaagggcgctcatttcggtaacaacgtgagccattctcatagaagatcaaatagaatgtggaagtcgaacatcaagcgtgtcagctgtaaagtgaacggaacaccgaagaagttatatgtatgtgcttcctgtttaaagtccggcaaagtagaaagagcttaggaaaagtaataacatctgtttcagtcctgctgattcagatgttatttttttctcttccctactgtaattttaaaggcggttatcccaaagataatcgccttttttctgcttttatgcaaaatcaaacagcgacagctggttcgactccggcagttcgccgagcagtcccagatctgccataagatcgatgaccgtcttggtcgccttggtgcgctgcctgaagtcgtccttggacagaaacttgccatccttcgccgcctcggcaaccgcaatcgcagcattgtcacccataccgtcgatcgtgtttaacgccggcatgagtttgccgtcaatcacctgaaaacgatccggctttgcgcggtacacgtcgatcggcgtaaaatcaaaccctctggcatacatctcctgcacgatcttcatatcgcggtaggtatcctgctcctttttggagagtgaatcctttctccgcgtgtaatccttgtaaaaatattcaagacgctccttgccctgacacatgatctcgtagttaaatcccgtcgcacggatcgagaaatatgccgcatagtaagcaagaggataatataccttacagtaggcaatacgccatgccatcataacgtatgccgccgcatgtgccttcgggaacatgtacttgatcttcagacacgaatctatgtaccactccggcacatcatgcgcacgcatctccgtcttccactcttcctttaagccttttcccttacgcaccgactccatgatcgtgaaggactgctcactgtcaagtcccttctggatcaggtagatcatgatatcgtcacgggtacagatcgcggtggaaatcgttgccagtccctgctcgatgagtgtctgcgcattgccgagccatacgtccgtaccgtgggacagaccggagatacggatcagatccgagaactcctgcggcttggcatcaataaccatctgcatggcgaaatcggttccaaactccggaataccgagacatccgagcggaattccatgaatgtcatccggcgtcacaccgagtgccgatgtattcttaaataaggacatgaccgactcatcgtcaagcgggatcgttgtcgggtcaattcccgtcagatcctgcagcatacgaatcatcgtcggatcatcgtgtccgagaatatcgagttttaacaggttgtggtcgatcgagtgataatcaaaatgtgtcgttaccgtcgctgtcgtcatatcattcgccggatgctgtaccggcgtaaacgtgttgatctcctctcccaccggaagcacgacgattccgcccgggtgctgtcccgtcgtcctgcggacgccgacacatccctgcacaatacggtcaatctcacagttccgcttgtggacaccgcgctcctcgtagtaattcttgatgtatccgaacgccgtcttgtccgccagcgtaccgatcgttccggcacggaatgtctgaccgtatccgaaaataacctcacagtaggcatgcgctttactctgatattcaccggaaaagttcaggtcgatatccggctccttgtttcccttgaatcccaggaacgtctcaaacggaatgtcaaatccgtcttttaccagcttcttgccacagaccggacagatcttatccggcatatcacatccgcttcgcccggagaacgctttgacctccggcgaatcaaagtcgctgtacttgcagtaggcacagcggtaatgtgcctgcagcggattgacctccgtgataccggacatggtcgccgcgaacgaagatccgaccgaacctctggagcctaccagataaccgtcctcgttggacttccacaccagtttctgtgcaatgatatacattacggcatagccgttggaaatgatggaattcagctcacggtccaatcgctccttcacgatggacggaagctcctcgccgtacatgctgtgcgccttggtgtagcagatgtcacgcagcatctgatcggaattctcaatgaccggcgggcacttgtccgggcgcaccggtgcgatcttctcacacatatcggcaatcttgccgggattcgtgatgacaacctcctccgccttggtgcttccgagatactcgaactcctttaacatctcctccgttgtccgaaggaacagcggcgcctggtcatcggcatccttaaatcccttgcccgccatgatgatacggcggtatacctcatcctccggatcaaggaaatgcacgtcgcaggtggcgaccaccagcttgttgaatgtctcgcccagctttacaatccgccggttgatatcctgcagctcctcaacagagttgatggcgctcttctcatcccgcagcatgaaactgttgttgccgatcggctgaatctccagatagtcgtaaaacttcacaagacggatgatctcctcctccggtctgccgtctaaaatcgcacggtagagttcgcctgcctcacaggcagatccgagcagcagtccctctctgtactttacaaattcgctctttggcacacgcggtgtcttgtgaaaataggtcaggtgtgacatggagaccagacggtagagattgatgcgtccgatatcgtttgtcgccagtatgatcgcgtgatggctctttaactttttcacaagttccggcgacgtcgcgcccatctggttcacatcgtctaacgtctccatgccgcgttcatgaagcatctcgataaacttgacaaaaatctccgccgtacatgccgcgtcatcgaccgcccggtgatggtgatccagcgatacaccgaccgcctttgccacggtatccagcttgaaacggtttaactgcggcagcaggattctcgccagcgccacggtatctgcgatggtaaaatcaaacggcagtcccatgcgctcgcagttcttgcggatgaatccggtatcgaactccgcattgtgtgccaccatgacggtcccctcgcagaacttcatgaattcgggcaggatctcctcaatcctgggcgcatcgagcaccatgtcatccttgatggacgtcagctgctcaatattatacgggatcggcacctccggattgacgaaggtcgaaaaacgctccgtgatagctccgtccaccaccttgacggcaccgatctcaatgatcttattcttatccggcgaaagtccggttgtctccaggtcaaatacgacatagctgtcatttaagctctgtccttttgagtcaacgataatatccttcaggtcatccaccagatacgcctccacgccgtagataatcttaaaatctgaatccggcggaaccgcatggttcgcgtcagggaaagcctgtacatcgccgtggtccgtgatggcaatcgccttgtgtccccacttcatggcgcgttttacaatatccttgacatccgagacgccatccatatcgctcatcttcgtatggcagtgcaactccacgcgcttctccgggctggtgtctgcacgtgtggacgtaaaatccgcaatctttttgatgccgaccacagaaccgatcgtaagctcactgtcgaacttgtcgatcgtcgtcacacccttgatctttaaaaacgctccctttgcgagtcccccgtcaagcagttcctgcagctgatcgtttctggtaaagatttttaacacaatcgaatcggtaaaatccgtcacggacataatcacgatcgtcttctcattccggatctctctggtctctaacgtcatgacctggcagcggatcgtcacctctcccatctctcccacaatcttctcgatcgcgatcggttcatcctcaaaatcacgcccgtagatcacatccggattgtccgactttttaaagccgccgccctcgaatctgcgcttgaattccttcttccctttttcgccatttcctgcagtttttcctgcatgttccgcaggttttgcagcattttttgcagaagaaacggtatttgtggtggcattgccgcctgtaccaccagatgttgttgtgccatcggaaaccgcctcggcaccgccttctacgaccgccggcacactctccccgtcgtcattgcggatatgtacctttttcatgatgtttttaatctcaaactgaatctgcagatcactgtttttcttatatttgctctccttcggctcctcataggcaagctccaccgccagatcgagtccgcagcgctcacagatcaccttctctaaaaactccacgatctcatgggaacgtgtctgtgcgataatcgtgttctccagcgtgagcagcatgtggctttcgctcgtaaactccatcttcgccgtccgaagaagattgtattccatcaggctgtaatctttcagttcttctaaaatgctgtcgcggtacagatcaagcagcttttccggcgtatactgttccgagagatgatacttttcaatgaccttgacctgcatcatcctgcccttaaaaatctgttgtgcaatggcagattccaactggcggatatcttttttgtgaatcaaacgcgtgctgcttaaatagacgcgcagatgatcgcgctcatgattcatacccaccttcgttacttccgtctccgtcagcagatttttcatgtcgccttctacctgcagtgatggaaatacatcaaaaaaccgttttgccatgcccttttctcacttcttcctcagtctgttctacttctgctgctcattccagtgcagcagctcatagcgcaatgcctcaagcagttcgccctccggcacctttttatatacttccccgttcttgatcaaaagtccctctccgattcctccggcaataccgatatccgcttcctttgcctcacccggtccgttgacaacgcagcccataaccgccaccttgatgtctaacgggatgtctgccaccatattttccacctggttggcaagcccgatcagatcgattctggttctgccacaggtcggacaggacacgacctccacgccgcctttgcgcagccctaaggtacgcaggatcagcttcgcggacttgatctcctccaacgggtctcccgtgagcgatacgcggattgtatcgccgattccctgatgcagaatgagtcccagcccgatcgaggatttgatattgccgctgatgatggtgccggactccgtgatgccgacatgcagcggatgatccgtctgtgtcgcaatcagctcgtgtgccttcacgcacatcatcacatcggaggatttgatgctgatgaccagattgtcataccccatatcctcgatcagatgtactttatcgagggcgctctcgacaatcccctccgccgtcacaccgtgatatttttccacaagatctttttccagagatccactgttgacgccgacacggatcggaataccgcgctcttttgcggcatccaccactgcgcgcacacgctctgtacttccgatatttcccggattgatgcggatcttatccgcaccgtgctcgatcgcggcaagcgccaggcggtaatcaaaatgaatatctgccacaacgggaatgctcacctgctttttgatctcggtcaatgcctccgccgcctccatggtcggcacggcgcagcggataatatcacatccggcagcggtaagcgcctgaatctgcgccacagttgcagccacgtcctccgtctttgtatttgtcatggactggatcaggatcggattgcctccgccgatcacccggtcgccaattttcactacttttgtcatctttttgcctttctatccgaacagcttgcggatatcgttaaaaaatgtaaagaacatgagtgcaaacaacagcatcatgccaataaaatgcaccatgccttccttgtcgggatcgacgcgctttccgcggatcacctcgacaatcagaaacaatagtctgcctccgtccagcgccggaagcggcagcagattcatcacaccgaggtttgccgataagaagatcgcaatataaagcatctgcaaaaataccatataatagccgtacgtcacgctctgctcatagctgtccccgatcatattgacgatcccgaccggaccgctcatgtcattgacgctcacctttccgcccaccagagacttcaggctgtcaatcgtcacccggatccagtattccacctcatatacgctgtattttaaattggaaagcacagaacctttcgtcttttgcgcgcttccctgaaagccgtacatataatagccgtattcttcgttatatttgggcgtgagcaccgtctgatagcgttctccgtcccgctcataggtcactgtgaccgcgtccccggaatgaaactgtgtgtaggcgctgatgtcccggaaaaaatgtatccgggtgtgatcaatctttaagattgtatctcccgcctgcattcccgcctcctcggccggatatccctccgtcactccggcgagcaccggcagatcatagccgatattgcataacagaataaaagcaaagacaaacgccatcaggaaattgaataccggcccggcaatcaccacactgatgcgcgcccagactgattttttcccgaacgccctgccgtcctcgctctccgtatcctctccctccatcatgcacgctccaccgatcgggaacagatgcagggagtatgtcgtctctccctttgtgatgccaaacactttcggtcccagtccgagacagaattcattcacccggattccgtttgccttcgccagaaggaaatgccccagttcatgaaaaataataataagactgaatatcagaattgcgataataatcttcatgcaaaaacctttccccatttgcctgcaatgtgttcatatgcggctgcctccgtctccaggatctcatcaaccgtcggattggcaataaaatcagctgcctccatacacgattcaatcatctccgggatctgctgataggcaatatttcgatccaggaaaagcgctaccgccttttcattcgccgcattaaatgccgtcggaatattgccgccgcggcgcatcgcctgataggctaacgcaagaccgcggaacgtctccgtgtccggtctctcaaacgtcagctgtcccaatgcaaacagatccagtctgtcgcccgagagcggtctgcgcttcggataatagagcgcatactggatcggcagacgcatatccggtgtgccgagctgcgcaatgactgcgccgtcctcatactgcaccgcagaatgaatcacactctgcggatggacaaccacctcaatctgctccagttccacatcaaacagccactttgcctccataacttccaggcctttattgacaagcgttgacgaatcgatcgtgatcttgcgtcccattgtccagttcggatgacgcagcgcatcctccacctgaatgtgtgccagatcttccggctttttcccgcggaacggtccgccggacgccgtgagaagaatcttcgcaatgcggttcccgttttctccctgcagcgactggaaaatagcgctgtgctcgctgtcgaccggcagaatcggcacgccgcatttttttgccagcggcataataatatggcctgccgtcacaagcgtctccttgttcgcaagcgcaatctttttccccgcttcaatggctgcaatcgtcggtcttatgccgagcatcccgacaatcgccgtcacaaggatctcgctctccggctgtaccgccacctccagaagtccatccatgccggacaccacgcggacattcagatccttcgtgcgatcgcgcagttctttggcggcgtcctcctgaaaaacgcataccagcagcggatgaaactctctcatctgctcttccagctttttgatgttgcttccggccgcaatcgccgtcacctgtatgtcgccctgctcccggacaatatctaacgtctgtgtcccaatggagcctgtcgatcccaaaatagctatcttcatcataggtctctcccaaaattacaatacaatcaaattagcggcaaggaaatagatgagcggcgccgtaaaaatgacgctgtcgaaacgatccaggataccgccgtgtcccggaatgagttttccataatccttgatgccgtaattgcgcttgatagcggaagctgtcagatctcccaccatggataccagtgcgcccgccgcactgatggctgccataatccagacatgtgacatttcacttcccatcgccccgcgaaataccatgccgtaaatcacggtgagaagcgcagctccgatcacacctcccacggcgccctccacagactttttcggactcagcttcggcgtcatcttatgcttcccgatcagcatgccgacacagtacgcgcaggtgtcgcatccccaggaacacagaaaaataagccacacaatgtaggttccggcgctaagcattctggtctggtacacgtaagacagcatcactgccacatagaacacgccgaaaaatgcggcgagcagctgctccgtctgatacttcgggtaagtgaacacatacacgaacatcaatacgatcagaagacctaaaaccagcatcatcagatccggcagaaagccgaagcgcagattcgcatagtagaccgccgccgttgcatacccgacaatgcccggcgcagacttctcaatatgaaaaatccggtataattcaaacatcccgatccaggaaatcagcaacgtggacaccagcagcacatccccgccggtaataatcaataccaatgcggcaatcacaagaacgattccgctcaataatctcgtcttaaacatatctcctccatccggcagtccagcctacttattgtccgtcaaaccgccaaatcttctgtctcttttattatacgcttcaatggcacgctctaattcctctttgtgaaaatccggccacggcacatcggtaaagtaaaattcactgtatgcgagctgccagagcaggaaattggacaacctgagttccccactcgtgcggattaaaaggtccggatccggaatgcctgcggtatccagatactcctcaaacacactttccgtgatctcttccggctttctcttccccgccgcaacatcttcgctcatacggcgcattgcgcgtgtcatctcgtcgcggctgccgtaattgatggcaatctgaagattcaagccgtcattttttgcggaggcagcctccagttcacggatgcgctcctgaaagcgctcactgagtctcgtcgtatcgccgatcacgcgcacgcgcatattgtttttgtctgctgtcttaatgcagttcttcagatagctttccaaaagcttcatcagcgcttccacttcgccctccgggcggttccagttttccgtcgaaaatgcgtacatggtaacatactttacaccgagatcatgtgccgcctggcataccgtctcgacatttctggctcccgctgtgtgtccgtaattccggggcattccctttgcctttgcccatcttccgtttccatccagtatgatcgctatatgctgtggaatctttcttcccgtctccatacctgtgcttctccctcgtctctgtactgaagtatcaactatacaaaataacggaaaagatacagatgtatgcctccataaacacctgtatctcctctcgtttcaaatctatccaaactatacggtaaggatttcctttgtctttgcctcaacggcacgatccacatctgcgatgtacttatcggtcatcttctgtgcctgatcttccagctgcttgatctcatcctcggagacatcctccttggcaagctttttaaaggaatcattggcatcacggcggatattgcggattgcaaccttcgcattttcgccctttttctttacatcctttgcaagttccttacgtctctcctcggtaagctccgggaacagaagacggactgtctttccatcattcgtaggattgattccaagatcggaagtaaggatcgccttctcaatctcctttaccatggatgcctcccacggctgaatctgaatcatacgcggctccggaacactgacattcgccacctgctgaattgctgtcggagtaccgtagtaatccactctcaacttgtcaagcacatgcggattggcgcgtcccgcgcggattccgccgaactcctccgcaagattgttcattgttttgcccatcttttcatcaaataccgctaatctctgatccatatatataccatgcctttctatcaattctaagaaaccgtaaccttcgtgccgctaaactctcccgtcatggcttttacgatactattctcttcattcagtccgaatacatacatcggcatccggttctccatacacataatggaggctgtcagatccaccaccgcaagcttcttgtcaattacttcctgaatagagacttcatcatacttcactgcgttcggattcagcttcggatcactatcatacacgccgtcaatcgcttttgcgaggtagattccgtccgcctccatctcaatcgcacgcagaacaattcccgtatctgtcgaaaagtatggatgacccgttccccctgcaaaaaacacaaccattccctttgcaaaatacttattcgcacgatccttggaaaacagctttgtcatgcttccacactcaaaaggtgtcagaatctgtgtctgcatgcccacagagcggaaaatctctgaaacatagatgcagttcatgatcgttgcaagcatgccgatctgatccgctttggtgcggtcgatcgtctcgctggtgcgtcctctccagaagttgccgccgccgatcacgatgcctacttcggtaccaccacccacaatctgctttacctgttttgcaacctctgtgactgtcggctcgtcaaatcctgtgtgcttatcacctgcaagcgcctcaccacttaactttaacagaactctcttcatgatgcttagtttcctttcttggcattgaacaggctctgaacatccacatctgcatagcactgggagcagaatccctcaatcacagcgccgttgttgatctgaacagaacgtgacttgatgttacccataaccactgcggaagtatccacaacaaccggtccctgcacatcgatgtcacccttgatggctcctgcgatcactgccgagttggatgttacattacctataattacagaaccaagaccaatcttaaccgtaccggagcttacgacttcaccctctacctgtgcagaatccgcaaagaattcggaagtgttgctgttaccattgacaacacctgtcacggtaagctttccgttgcaacttacatttccgtctacctgacctctgatgtcgagagatccgtttgagatcacatcaccgttgataatcgttccctctgtaatcacggaaacctcgtccgatacaatcggcttctcctgcggtgtggtctgcgatgctgctgtctgtgctcctgtctgtgctacctgtactggtgttactgtattatcagccattttcttctcctcctgtgctgctgccattgcatgctgtgtgtattcttctcttgttttctgtggttccaccgttgctgcctgtgtccgctccaaagccggctcctgcttcgttacctgctctaacagaccatccagcttcgacaattcgctcgccacatccacttcatcttccagtgtgttcacgaccatgtcatcatccttgtccgtgctttcgagattgtcttctcccggcataagttcattcactgcctgtgagaaatcatccttaaagtccttgaaaaatcccatgttcttacctccatttataatctggtcatctggcactgtcggctttgacatactggataacctgtgtatcttcatcaatcggtaaaatctcggcatccatatcctgcaatgcctcgatcagcggtcctaccgcttctaccgttgttgacctatcttccgagtcgtgcaaaagcacaaccgaggtcttgtattttgaaacatctgaaacaacattctcgaccagttcttccggtgtatatgcagcatttgccgcatcgcctgccgagacgttccagtcgtaataaacgacgtcctcgctgtttaaaaaccggatcagcgaactcatcggcacattgctgatctgattgctgctcccgcccggaaaccggtaatagcggctcttttcaccggtcacctcatagagataatcctgcagctgatgaaaatccgcctcgaacgcatcctccgactgatagatcagactgtacttattagaataggaatgcattcccagcgtatgcccctcatccacgatcctctggtagatggctgccgatgcctcatcctcttttccgaccacaaaaaaggttgccttgacatcgtactccgacagcacatctaaaatggcgtccgtattctcagacggcccgtcatcaaacgtcagataaactttatgtacatctccatcctgtgccagattgtctgtctcgtcgatcccggatgcaggtgccgtcacagccactgtctccgtatccatgccgctggtctcttcctggggtagtgcctccgtatccggcacctgctggttcatcacccgctgcatctgccagagttcatctaactttctctccatggatctcgtccggacaagcagaaaaatgatcagaatcatggacaggatgatccacccggcaattatcgcgattatggtatgtttcattcttgcaatccgctttctccgcctgcgttgattgcggagtgcctcagaatccttatcctgcatgtagaacccccaagttaatcataatactttatctattgtatcacatttttgtatttttcaaagaaaaaagcgcaaaaaaatcgtatgatttttctacactttttcatgtattttctgaatttttatgtttctcccgctaaaagcccggtgaccaccgcccccacactaaacagcatcacgccccaggcgatgacagccggcgatgtcccgcgcagcgggattttccctaatatggcaaccggggacgccgccagcagcccgaaaattgcccagtagctcagccgctcaaaccggcagagcagatattccatcagctttgcgacaagaaaaatacctccaagcacgccgcatccgaacgggactaataggacaagacagtaccacgccgtcccggcatccagcatgaccaccgccacaacgaacgcattgatatggtcaatgaccggcgtgtaatatccgagcgccatcaaaagcatcgaaccgctcacccccggaatgaccatcgtagccgcggcagccagccccaccgcaaaaagcttcactgccgtcccaggaccggcggcaagaacctgttcgctgccttttccaaggaactgcattccaatcatcaggcagaagaatcccaaaaacagtgccagctccggcaccttcggatatcccctggacaccttgcgccagatgagcggcacgccgccgaaaatcagtccgataaaaagcatcgcggtctggaacggaaaattctcaaaaagataaccgatcataaaggaaaggcagataattccgatccccattccaaacagatacggaaacagctttaagatgctttcctttttatgacggaaaaatccggtgaccgcctgcagaagttcatcataaatccccagcgacaccatgatcgtaccgccgctcactcctggaactacattggcgattccgatcgtaattcctcttatgacattctttatgaattccatacatcctccacttttttgcatgctgcctttctctgttccgccgcaagcgattcgctcttcttatccggaagaagatgctctgccatccctgccagcagatttccggccggaagcaaaagcagggtcgttccgatattaaaaatcgtatgcatgttggcaatctgggcagccggccgtcccggcgtcagctgcgcaaccagcgaaacgagcggcgttgtcatgcacagcacggtaaacaccaccgttccgatcagattgaacgaaagatgaatgatcgtggtgcgcttggcgtttcttccggtgcctatggcagcaagaaccgccgtaatgcatgtgccgatattctgaccgaacagaacatacaccgcccccgcgaaagatacggctcctccctgtgccagggtctgcaggataccgaccgaagccgaggatgactgaatggctgccgtgaacgccgcgcccgccaggattccaagcagtggatgttcaaactttgtcattgcctgaaggaacacctgcgaatcacagagcggctgcatggcttcccccatcatatccatgccgataaacaggattccaagccccgccacaatctcgcctgtgtaccggatccggtcttttcccgcaaacagaatcagaaccaccccaaaaaaagccagaagcggcgcaacggctcccgcatccagtgcaatcagctgaccggtgattgtggtgccgatatttgcccccatgataatccagaccgcctggcgcagagtcatcatcccggaattcacaaagccaacgaccatgaccgtggtggctgaggatgactggatcaccgccgtcaccgctgctccgatgcccacgccaaggaagcggttctttgtcagccgctccaggatctgcttcatcttctcacctgcggcagcatttaagccctcgctcatctgatgcattccatacaaaaagagtgcaagcccgcccagcagtgcaaaaaaatttttatattccattttcttcttttcccttttcttatcctaatcttatgacgcttctgatacctgtgataaccaaaagggcaaatcttttttaccgtcggaattgtgcacgaatcgtaccatgcggtaacctgccaggcagatgcacgccgccgtgacggtaagcactaccgcctctgcatagggaatctctgctattttgaataaaacagcagtaaaaagatgaaaaaaaagacgctgctccgccgccccggtcatttttctcgtcacgacaatcatactctgtgacaatcctgcttccggttccgctgagagcgcgtttgagacataatcggagtccgtcgtccgtaaaataccctgtgcttcccctccggcctctgccgtcagattctgcacctgggcgatctgtgtctgccacagacagacaccaagatgggaaaacagcagaaccgccatcatgcaaaccgcaaaaaacgcttttcttctatctgcactgcgcatgttccctgctcctttcccattccaagactctttcctcacgatagcaaagcacttacgacttgtcaatagatgcggatatattttccataaacctgcgcagtgtctgttccgtcgtcgcaatcgcttcctccggaataccttcggccagcctgcggaaaaacgcagcttttttctccgtcatctgctctgtgagcgcactgcattgctgcgtgagatataaatggcagattctcttatcggcagcatcccgttccaccacaagaaactgcttttccacgaggctctccaccgatctggcaaccagtcccttggacaccccctcgtactgcgcaatatcccgcgccgtattgcatccgccgttgtcgcgtgccaaaaaaagcagcaccagcaattcgttcggcgtgagatgatatttctccatctcatcctgaaagtatttccggtatgctttctctatcttaaaataattttcaaaaaagtcttccagcatgttccccctcctttccgccggttcatgccttctcttcgctttagttgatttgtgaactgtttatatagaaactttatttgaaatctgtataaaagtcaattaaaaaagtgttaagatttcagaaaaatcactccgactcggttgactttctacacaacaaccgataaaataatagttgatttgtgaactgtttaactggtaactctattaaccatattcttgaaagtgtgtgatgctattttgaacaaaaaattaaaagagaaattcgacgaatctgtaagcgccgttcttcccattaccgtcattgtgctgttgctcagcatttttgtcgtgccgatggagaccggaaccattgccctgtttctggtcggagcgttcatgctgatcatcggcatggcatttttccagctgggtgctgagatggcgatgacgccgctcggcgaaggtgtcggttcccatatcatgaagacaaagcgtctttcgattctgattattgtctgctttgtgatgggtgtcatcatcacaatcgcagaaccggatctgcaggttctcgccaatcaggttccttctattccaaacgaaaccttaatctggacggtcgctctcggcgtcggtgtctttctggtcatcgctgttttgcgtatcattttcaagctgagcctccccctgctgctgtgtatcctctatgccgcactgtttttgctctcctttgcggcgccggctgatttcatcgcagtcgcatttgactccggcggtgtgacgacaggtccgatgaccgttccttttattatggccatcggtgttggtctctcctccacgcgaagtgacaaggacggctcgagcgacagtttcggtctgatctccttctgcagcatcggaccgattgccatggtactcctgctcggtattttctaccatccagccggtgcatcctacaatgctaccgaaataccggatgttgtgaccatgcaggatgtcatgcgtcagtttgtacatatgctgccggactatggcagggaagtcatttcttccatccttccggtactgatcgtctttttactgtttcagcttatttccaggcgctaccacaagaaccagatgatcaagatgcttatgggctttctctacaccatcatcggactgatcctgtttctgaccggtgtcaacgtaggatttgctcccgtcggaagtctgctcggcagcaatctcgccgcacagacatggcgctttgttctgattcccatcggcgcgttaatcggttattatattgtaaaagccgagcctgccgtgcaggtgctcaacaagcaggtggaggatgtgacaaacggttccatttcgcgcagtgcgatgaacctctgtctctccatcggtgtctccgcttccgttgcgctggcgctgctccgggttctgaccggacttaacatttactggctcttaattccgggctacatcattgctctggtgctcacccggtttgttccaaaagtatttgtcggtatcgctttcgactccggcggtgttgccagcggtcccatgacctccacgtttcttcttccgcttgccatgggcgcatgtaccgccgtgggcggcaatgtggtaaccgatgcgttcggcgtcgtggcgatggtcgcaatggcaccgttaattgccattcagatcatgggcgtactgtatcagctgaagcttaaaagagcgacatccgacgcgcttatcatggtcgatgtcgacgacaatgccattatggatattgaggaggaataattatgcaggatcataccatgcaacataaaaaaaagatgccggcattccggtgcctcgtcattatcatagattccaatatccgtgataaactgaccgaatttctcaccgatgcctccatcccgatctattaccagatgcacggcgtcggcaccgtcagttccgattttctgaatctgtgcggtctcggcgacacccacaaaaccatcatgctatgcatcgtcccgaaggaacgcacccggatgctgctggcggagatgaatcaggcgctgcagcttcacaagagaggaaccggtatcgctgtcagcataccgttatccggcattcagggatggctctataaagttctcggttccggttctttggactcctctgagccggagatagaaaaagaggtgaaaaaaatgagtgaaacgattacacatgcaatgattcttgtcacaatcaatcagggatacagcgatgatgtcatgtacaccgcgcgcgctgccggcgctaccggcggaacgatcttaaagggtctgcgctgcagtccggaggaggttgccaaacatttcggcatggctctccaggaggaacaggaagtccttgccatcgtcgttccaaaggataaaaagaccgaaatcatgaccgccatcagcaagcagcacggcattgacacaccggcgcacggcgtcagctttgccctgccggtcgacgcgatcatgggactgtagaatttatactttatgacgcaaaaaccttatcgaatcataaccaggttcgataaggttttttcttacaaaatgacccctgcaaatagtgtctccaccattcgtaggggtcattatccttcaacaatttagcacaatatcaaattatgcgttcatctgtgctgcaacttctgctgcaaagtcttcctgcttcttctcaagaccttcgccagtctcaaaacgaacaaatctcttaaccttcacagtaccgccaactgccttggatacttcctcaagatacttggcaacggtctgcttgccgtcctcagccttaacgtaaacctgatctaccaggcatacttccttgagttctttgctgatacgtccttcgatcattccgttgattaccttctccggcttctgggactccttcggatcgttcatgatctgtgctaagaggatctctttctcatgagcgatgtaatcagcacttacctcgtctctggaaacatacttcggattgagtgctgcgatctgcattgcgatattgtgcattgcttcctttacagtgtcatttacaacatcggtgtctgcatcaacgataacgccgattcttccgccgccgtgtacatacggtacaacacagccatgctcagctacaaccttctcaaatctgcggatctttaagttctcgccgatcactgcaaccttctcaaccagtgcttcacttacagtcttgctggcatcctcattccacttctcagccatgaaagcatccatgtctgctgcatcggaattcactgcctgtgttgcaacagccttaacaaactcctggaatgttgcattctttgcaacgaagtctgtctcagagtttacctcaacaaccgctgctgtctggtcatccttggtcactaccatgcaaagaccctctgctgcgattctgcttgccttcttctcagccttagcctgtccgttctttcttaagaactctacagcctcgtccatgttaccgtttgtctcatttaatgccttcttgcaatccatcatgcctgcgccggtcatctcacgcagttcctttaccatagctgctgtaattgccattttctcatcctccaaaaaataatttatcctgattctttatctttacgccacagaaagggacgtaacacgcgtccctttccgattgttgacatatgggcgatcctgccaatcaggcacccgttgtttccaacttattatgcttcctctgctgcatctgcctctgcggactcagcctcttctgcagtcatctctgcaccctggtttgcctcgatcactgcgtctgccatcttggaaacgatcagttttacggctctgatagcatcatcattgcccgggatcacataatcaagttcctcaggatcacagtttgtatctgcaataccgatcagggtaattcctaatgtatgagcctcctgaatgcagattctctccttcttcgggtctacaacgaagattgcatccgggagcttcttcatctccttgataccgccaaggttcttctctaacttctcccactctttcttaagtgcgataacttccttcttcggcagtacttcgaatgtaccgtcggttgccattgtctcgatctcttttaatcttgcaatacggctctggatggtcttaaagttggtaagcataccacctaaccatctctcatttacatagaacatgccgcagcgctctgcttcggtcttgattgcatcctgtgcctgcttcttggtacctacgaaaagaatggtgccgccctcagctgcaatatcagatactgctttgtaagcctcgtctaccttgcctacagatttctgtaagtcaatgatgtagatgccatttctctctgtgtagatgtacggagccattttaggattccatcttctggtctgatgtccgaagtgaacacctgcttcaagtaactgtttcattgaaataacgctcattttcttacctccatggttgaaatcttccatatgcttcatcccgcaaggcaaccattcggcaccggcccggtggtcagcatatgtgtattattgtgtggaaatgattttccacgcttgaacctcgcatattatatcacaaacatctttgctgtgcaagtacctttttactcttcaagcggtcccgcctgcagaatttttgcaatttcctcattcgacagaccgtaaggaatatcgtagttgccaacacgcatattggaagcgtagccgatctgcgataaatactgccggaacgtctccgcatcggaaatgactccgttctccgccagcttctcgcatacaatacggcagacatcccctttctgaatcaccagacggtatacgccggacggattctctgcatcagcagcctcctgctgtgcctgcgtctcctcatccgtattcgcgctattctcctgcgcctcagctgccacgtcctcagctgcagcttccgtattctgcgcggtctcttctgccgcggtccgttcttccaacagttcggatgccgtctgctcggtcacaacctccgtcttcgctccggtgtccgtgccgtccggatcctgctccgtatcgccctgctctgttgtctccgtctcctgcatgaccatgccaagctgtgccgcccgcgccatgatctcctcatcagacatcttgatctctttctttgaaaaactgactgccagtatcaccgttgtgacaatgattccgatccccagtccccgcaaataatatttcagtttcacgaatcactctctcctctgtaaagcccattgaccaggcgaacttcaccgattccgattccaagcttcttggcaatctgaacctccgtcattccgagttttttcaacttcagaatctctgcatgcagtccttcctgctttgtttcttccgtctccggcatctcttccttctgctctgccggtgcagcagccgtctctctctccgtcgtatctgccgtctcaaccgataccggtgttactgccgaagccgcagataccgctgcggcacgctccgatgcagcctgcggtgcagtcaaaggtgctttctcctcaaggcttcttacatccgcagccaggcgctgcagatccgccgccataccggtaagctccgtgtgtttatcgttcagcatactgtataagaacataatctcattatgcgttttattcatgctctcgatcaccgtgtcggaatattcactgatcgccatgatcttatcgtttgtcactttttcaagggaacgatccaccttttcggaagactggtcaacctgctcatcaatcgcatcctcaatccgtgtctccgcattcttgagtccccggtcaatgattctctttaattcctcttcgctcaactctgcaatctggttcaattctgacggcgataacttttccgtcacaaaaaagcttccgatcataaaaaccacaccgatcagaagtaatatccatgctactccggtcatatgcttctcctcacctatctatatcttgatatcaaaatggctgccctgcccttttaatatgacttttccctcattctcaggctcctcttcgcggcgctttttgtgcctgccggattcgccctcatattcgttattgcccttttccttggcatcataacgatagccatcgttctccttttcctccggatcctgcacacgatgggtcagctggtcttcgtgcttctgctgttcaatctgaatattctgctgttcgacaatcggcctattatcctcctgctgcttcagattcccgacatcctgcgtcctctgaatcatcccgtttaaaacaactggtcttattgacatgcaacacacctccgctcatctgctactcagtcagaattcccatatagcttcccatctttttgcgcatcttaagcagcgcctttgtgtgaagctgcgacacgcgcgattcagacacttccaatatattgctgatctcctttaacgtgagttcttcataataatacagaagaatcaccttgcgctctttttccgtgagcagatccattgtctcggacagaacttttttcagttcttcctcctcaatattgtcctccggctgtgcgaaatgggagttcccgcgcgcatccatcaccggctctccgccctgctccacgaactcattgagagataccacatttgtgacttttaactgcgactgccactcattcagttcagccgccgcaattccaatctcccctgcaatctcttcatccgccgcagcacgtcccgtccgcgcctcgatatttttgattgcttcctcaatccgcttctgcttctgtctgacagtccttggtatccagtccatcttgcggatctgatccaggatggaaccgcggatacgcaggctcgcatatgtctcaaactttacgtcttttccgggatcaaacttatcaatggcatcaataagtccgaatattccataactaaccagatcttcgtattccacattgtatccaagatacatgctgagccggcccgcaaccactttcacgagcggtgcatattccgtaatcagcttttctctcagcgcagacgatggatttttctggtattctccccatagtttttctctgtcaaccgttttcattggaagcccccacgtctaaagattactgttctttcgcatcggcattctctgtctcctccgatgccgtttcattctcttctgcctcaggatcctcttcttcctgcggcaatgtaccatccgtggtttcctcgtcattcatcccggcaaaattgcggtcaagaacaattttgaccacaccgcccagaaggtaaaatacaatcaggacaatcaaaagcattttcatgaaatctgccacttccatgtgtgcacagatgcccgctacgcaggcgacaaacccggctgacagcatcacaatcgcaggtactgattttgttttcatacttacagcccttccttaaataatcttaagcggcttgcccaccgacttaatataaaattctccggtatcacaatgcagttccactgttctaccataattgagtcctgtatcttccgctaccagccggattccaagttcttttaaaatcgctttggcagcctccgcattcctcgctccgatatttcccacatccgaaagtccgcttacctcaaacatccgcgcgcccccggcaatcttggcgatcagtcttggcttacttgctcccgctgcaacaacacgctttaacaattcccgaattcccgtatctccaaacttagctatattgctgttgtttcttacttttgtactgtcaggaagcatataatgcaccatgcctcccacttttgtcaccggatcataaagaaccagtccaatacaggaaccgagacctaaagtcgtaattacatccggagccttgcaaacgttcaggtccgccatgcctacttttatgacttcgctcatatacgcattctccttatattgagataccaagtgacgttaatattttttcgtaagaatcctgctccggcatcaagatgaaatatccgttgatcgccacatccgcacagatctccgtctgtatcaacaatgcattgtcaccgtactgtccaaattcaatcgccggcacgctcaaaatcgatgctgccatgtccaccgcgatgtatggaacggacggagtgatgacaagattggtcagggaggacaatgcggacagataagatcccgcaatgatattgccgatctcttttaatgcggaaagttccatctcgccaaacggctggtcatccggttcgtttgtcatcatcaacttgttgaccagataacgtgcagacggaatatccagaaggaacatcatgcttccctcaatatctgtctccacctcaaggaaaatgccgacaattgtctcatcttccgctcctaccgccattcccaactgtgatacttccatcagtcggatgctcggtacattcatatcgatcttcatgccaagcatatttgcaatggctgaagtggcatttcctgctccgatattgccgatttcacgcaatacgtccaggtacatgtcattcacttgctctagtgtcatattacccatgaacgttttttctcctctcaacataatatatccatggttttctaagaggaatgtctctggttctctcccgctgcattccctgtagtaaaacaagcaggttagcggaatgtattccattccgctaacctgcgcacacgtctatgcacgcatatgttctgtgtgcttatgcgttgtcatccaccaccgagttaatctcgagaagtgagatcagatcatcgccgtgtttaccgattccattgatgaatttacccttgttggtcgatttttcaatttcatcctcacttaaattgacgacttccttcacctcgtcgacaatcacgccgatcgcgcctttttcttccagctttaagatgatgatacggctcgcgttcgtgaacacatcatcctccagccccatcttgttgcggatactcattacggatacgatctcaccgcgcagattgatcacgcccttaaagtaggactggatcttcgggacacgggtaatcttctgcatacgcacgatgttgtcaatatagctgatatcaattccgtactgctcgcttccgaccattacgacaatatactgttttgactctttgtcaattacttccacgttcttttctgccatgttgtccgcctcctcttacatcagtacattcacatcaaggatcagtgccacttcaccatcgccaaggatcgttgcgccgctgatgatcttgttgttgtttatgtatttaccaagtgacttgataacgatttcctgctgtccgatcaggttgtcgaccacaaggcctgccagattctcgcccttctgtacaatcacaaccgtcaggctctccggctcttcttctttcggctcaatatccagaacctgatccatacggatcagcggaattaccttgccgcggaggtgaatcacttcctgagcctccacatacttgatatccttcaccggaatatcctcgatgttggaaatggaaccaagtgcgattgcgtatttctcatcgcggatctctaccatgagtgcctggatgatcgcaagtgtcagcggcaggcgtacggtaaaggtcgttcccacaccgagctctgtctttacttccacatcgccgccgagagcctcgatgttggattttacaacgtcaagtcctacgccacgtccggaaatatcggtaatcttcttcgccatggaaaagctcggcagaaacagcagattgatgatctctttctggctcattgtctcagcctgctcctcagtgatgacaccgcgctcgattgccttgttgcgcacagcctccacgtcgattccgttaccgtcatcgccaacctggatgatgacattgttgccttcctggaatgcgttgaggaaaatgcttccgacttccggcttgccctttgcaatacgggttgcgttgtcttcaagtccgtgatccgcggaattacgaagcagatgctgcagcgggtcaccgatctgatcgactacggtacggtcaagttctgtatcttcacctgtcatgtacaattccatcttcttgtccagctttctggaaagatcacggatcatacgcgggaattttgcaactacactctcgattggcaccatccggactttcatcacggactcatgaagattggtcgtgatacgctccagatattcaatctgctcatggaaggactggttctggaaatctccggaatcggtggagctgatcgacaccagactgttctttgcgatgataagctcggatacctggttcatcaatgcatccagcttctcaatatctacacggacagtacggtttgtgacaggctttgcaaccgtctgctttttattgccgctgctctgtgtcttcgctgccggctttgctgcctgtgcctgtggctgctcctgtgccggtgccgcctcagccggtgcatcctgagacttctctgccgccgcagcgtccgcttccgctttctcctgctttgcagccagcgtctcgtattttacttcctcaccgacaaccttatcaatctcagataccgactttgcagcttccgcaatcttctcatacggctcgtccgacgcaataaaaatgctgaaatcgcagtcgaacttctcatcctcaatatcctgggagctcggattgtatacaaggatctctccaaactcttccactgccttgaataccaggaatgctctcgctgcctttaacaggcactctttctggatatagatggtcatgccataaatgtgtgcgccgccctcttccgcctgcttgattttatccttctcagactcgctgagaccgaactcaaaatactttttatcatctccgcccgcggtctgtgccggtgcctcttcttttttcggctccgcctgtgcaggtgcagctgctgcgccatcctccgccgcgatgaaatcattcagttccttgatgatcagttcgttgtcctctgttccctcatccgaacttgcctttacgttgtcgagatagccctcgatcgcatccaggcacttgaacagaaggtcaatcatagaactggtcactttgactttctcactgcggacctcctggaacacattctccatgtcatgtgtcaggcgctgcattctcttaaagcccatggttccagccattccctttaaggagtgtgctgcacggaaaatctcgttgatcgtgtccatgttctccggatctttttccagctccatgatgcagtcacttaaattctgtaaatgttcacttgtctcatcaataaaaatctcaaggtattggcttacatccatattactttacccccacattcttaataattgatttagctacgtcattaagaggaaccacttcatccacaacgcccgcctcggcaaccgccttcggcattccgtataccacgcacgacgcggcgtcctgtgcgatcacatagaccggcttcttcccggcaagggaaacaatccccttggtgccgtccgcacccattccggtgagaaccacgcatacaacctgatcgtaaccgcagtcccgcagggaatcgtacgtgatgttggcacacggcttcaagccgccgatcgcaggcatatcgttcaaccggatcctgtgacttccatccggctggcgcttcacttccatgtgcttgccgcccggtgcgatgtacaccgttcctttcatcagcacatctccgtcttccgcctccttgacatgaatcgggctgacctcgtccagtctgtctgccattgacttggtaaatccggcaggcatatgctgaaccagtaccatcggtgcgtccagattcttcggcagatatggaatgacactctgcagcgccttcggaccgcccgtcgaacatgcaagcgcaacgatcttgctgccgctcttgatcgcatgtccagctgttgcaaccggctttgcggtccccgcaggagccgatacagccttagtctgcggtgcgatgcgccgttcgcgattgtaactctgggtcgcgcataccgccgagagcacgtcgagaagctgttttttgaactcctcgccctttgcctcaataacattggttggcttcgtgacaaaatcgactgccccgcgctccatcgcccggatcgtgacatccgcatccttggttgtcgtcgtacttaccatgatgaccgttgcacggattctgtccttctgtaactgttccaaaagctgcagtccgtccatgcggggcatattgacatcgagaacaacgccatcatagcgcgtcgtcttaagcttctcatatgcctcaagaccgtcacggcaagtatctgtgacctgaaatgttccgtctgaattgattatatcacacatgacccttctcatgagtgcagagtcatcaacaatcaaaatctttttactcatatcttatgctctacccctttgacgcgctttgcgttcttcttcaaagatgaaccggatgatttcctcccttacgctgctgtcggtaatcaggaatttggctctggcctcgtagggcgtttccggcgttttttctgtcttgatacaggaaataattgttccaatgatataatattgtttgtctaaattttcattctgcagatgtatctcaaagagaacatactgattctcccgaagcttctgatccgtccgaaaccggataccgccgccgcttagatccacgatccttccggcatattcccggtctctgctctttccctccgcttcctgcagttcaataaatagggcttctcccgtctttaatgcggcttcctgttcctcaatggtgtaataattcatgtccataatacatggaaaccggaagaattctcttctctgatacttggagatctgggattttaattcgatctctaacatgtatacattctctcttttgtagcgctcccgcacctggccgacggcgcggtaaagcgttcccttcgagaaaaagataaactccatccggatgcccagcggaagcagcaccagttttcctctctccaccggcatggaaatctcaagattgccgttctcctttaaatccagcacctggcttttgtagattttcggcatggactggtctttttttgcccgttccacattctgtacgaaactgatgtcaactttatctcccggttgaataatttcagctattgtcatcattccactccttcattcttctgtttccaaaatcccgaaaacaatcttgacagtccaaaagaacgatatgcgtcactgctctcaccctgcagcaattccgcagccactacttcaaatgctcttgcagattttgacaacggtgcctgaagcgatactggtttctgcatccggatcgccttttcaagcgcgctatcctggggaatcatccccgcatatgtaatttccccctctaagaactgacctaccacagtattcagtttgtcataaactcctctgccttccgcagcagacgtcacacggttggaaagaaccgatatcttggtgtactccctgttaaacttcggattccggtacagagactttaacagagaataagaatctgtcagtgatgtcggctccggtgttgtgaccacaagaacctccgggcttgccagcacgaactccagtacatgattggcaatccccgcgccggtgtccaccagaatcacatctgccatctgatccagttccccgaaacagtgaagcagataagagatctgttcatcggtcagattgcccagtccggtaactccggttccccccgagacaaacccgattcccatcggaccttccgatatgatctccgtgatctgttttccatgatatatcacatctgccagattgtacttgggaatggcgccaaacattacttcgacattggcaaggccaaaatccgcatcaaaaacaagcaccctttttcccatcttctgcatctgcaccgcaaggttcacagccacattcgactttccaacgccaccttttccacttgtgacggtaatgactctggcatccggcttataattttgtttttttaatttcacaacacttctaagcttctctgcctgatccatgtgttatctgcctcccagcagctgtttcacaatcttttgtgtatcaaatacttcaatatcatctggtacattctgaccgctcgtcatataggataactttgcccccgaatacagcttgatatttaaaatattaccataagtaattgtctcatccagctttgtaaaaatcaacttataatttgctatttccctgtaagtatctgcgatctccagcagatccttatatttggtcgtcgcactgagcacgaggtatacctctttctcgtaagcctcatccagtccgtcgatcagctttttcatatcctggcactgtgcctcattgcggtgcgagaatcccgccgtgtcaacaaataccagatcatattcgcttacgcgcgcaatggcatcgttcatctcctccggcgtatagataatgctcatcggagcatccagaatatttgcgtagatgcgcagctgctctgtcgcagcaatccggtaggtgtccgcagtcagaaatgccactttcttctctttgtctaccttatagcgtgacgcaatcttggcaagcgttgttgtctttcccacgccggtcggtccgatgaaaaaaatcaccttcggctttttgcctgtaagctcaatcgtctgcggctgatcgaactttaagatcagcttctgataaacgttggaaagaatagaatccacactgcttccgttgtgaagcaccttctccgcctcgtccatgatctgattgacatacttctcattcacatcattctccagcagcgtgcggtagagcatcttgataaactggaacccttccgtgcggttctccttttcctgcggctctaccggatgagacttgcgcatctcctccacggaaaactgcttttccagaatattcgacaggttctccagccgcttttccagtccctcattcgtagattcgcgctttgcttctttcataggaacaacctcctgttccgccggtgccggtgccactgccggtctggtgttctctcttgccacccccggaatggtaatcttttcatctgcagccagactgatcgtatcgtgcacaggctttgtctcgctgcggagcgtctgcgccgggaacgcttccttttcctccaccgcagccgtcacctcatacagcgtgttcttaaacatcttaaacatgcccttgggcttaatctccttcacgttcagcacgaccgcccccgcgcccagctcctgctttgccttctcgacggcctcttcctttgtcttgccctgatatttgttaatggtcatttatattgtcaccatccctactgattgtaattctacgttggattccacctcattgtaagacagcaccgtcagatccttgaagtaatcctcggtcagcttcttaaagtacatacgcacaatcggcgatgtcataatgatggcaggcttgcccatgttctccaacttcgccacttcctcctcaacggatgccataatcgccttcgtgcgctccggatcgagcgtcagatatgccccctgctccgtctgcttgacagaacccatgatctcctgctcgatcttcggatctaccgtgatcacgctggttgtctcattcgccgggaaatatttgctggagatcgcgcgctttaagctctggcgtgcgtactccgtcaacacatcggtatccctagtcgccggcgcatggtctgccagcgtctcaaaaattgtgagcagatctcggatggaaattccctccgagagcagattctgcagaaccttctggatctcgccaagtccaagaagcttcggcaccagttcatccacgagaaccggattgctctccttgaggttattgacaaggttctgtacatcctgtctggtaagcagctctgcgatatgggaacggatcacctcggtcagatgcgtcgcaatgattgacggcggatccaccaccgtatagccaaggctctccgcacgctctctctggctctccgtgatccagattgccggcaggtggaaggacggttcaaacgtcggaattcccgtaatctcctcctccacatatcccggattcatcgccatatagtgatcgaacaggatctctccctcggtcacctgaattcctttgatcttgataatgtactggttcggattcagctgaatgttatcacgcagtcggataatcggcacaaccgtaccaagttccagtgcaatctgtcttcgtatcataaccacgcggtctaagagatctccgccctggttcacatccgcaagcggaataataccgtagccgaattccagctcgatcgggtccacctgaagcagcgacacaacgttctccggcttgcggatctcctccgcctccgtctctgcctggctgacttcctcctcgatattctcaatgccgatgttcttgtccaccattctgcccgctacgataaacgcagcgcccagcgcagcaaacaataccacattcagcggtgtcacagcaccgaggaagatcaacgatccaccgaccagataaagtgccttcggaataccgaacagctgttttaccagaatgttggagaagtctgcattcttggatgccttcgtgacaaggataccggtagaaagtgagatcagcagggacgggatctgggaacagagtccgtcacccatggtgagaagaccatagcgctgaatcgcctccgaaaaatcaagtccaccgcgcatcatccccatcgcggttccaccgattaaattgacaaacgtgataatcagtccggctgtggcatctcccttgacatacttcgtagcaccatccatcgaaccgaagaagcttgcttcttcctgaatcttattacgccgctctctcgcctgtgtctccgtaatggctccggtgtttaagtcagcatcgattgccatctgcttaccgggcatagcatccagtgtaaatcgtgcggatacctctgccactcgctcggaacctttattgataacgacgaactgtatgatgatcaaaatgataaatacgaccgctccgacgatcatatcaccaccgcccacgaagcttccgaatgtttcaacgacgttacccggagcaccggtcgttaagatcagacgtgtcgaggacacgttaagagaaatacggaatatggtagtaaacaacagcaatgtcgggaaaaaagacatatccagaacttccttcacaaacaatgtgttgaacagaacaatcagtgcgatcgagatattcagcgccagcattacatcaagtaacgtagagttaatcggcacaattaaaaagatgactgcagcaagcaaataaagcgcaacacctatgtcagcctttttcatatctcttcctccttcgttttactgtctcatattatataccattgcaagaatctccgctactgcctgatacaattccggcggaatttcattgccgatttcgacattggcgtagagcattcttgcaagcggtttgttttctacaatttcaatgtgattctccctggcagcttcacggatcttctgcgccagataatcttcaccctttgccagaaccaccggtgccttatgcacctccggttcgtacttgatggcaaccgccagatgggtcgggttggtgataaccacatccgctttcgggacatcctgcatcatacggcgcctcgatgcctcgcgcatacgctggcgctgtctgccttttacttccggatttccctctgtatttttgtactcgtccttgacctcctgtttggtcatcttcatctcttcattaaagcggtatttctgatagatgaaatcagcaattccgacaacgagatacaccagactgatcttgagccctgcaccgataatcacatctccacacagtgcgatcgcctgatttaacggaatatcatataaaataaaaaggtcattttcgtgatccttgattgcagtatacgcgatatagagaatcagtgcaatcttaatcagggatttgaacagttcaaaaacggaatccttggagataatccgcttcattccgttcaccggattaaaccggtccagctttggctgcatcggtttcgtggaaaccttccaccccacctgcagaatatttacaagtagcgtcacggcgaatccgaaaataaaaaacggtgccacgattttgagcatctgtatattcaccggtgaaaagaaagacattaccgcataggtggacacatccatcgcattgattccgataaaatccggaatcagattatatacatagtaaaatatctgaagaaatccgtcgccaatcgtggagacaaaaatcttcagcatcagaaacatcacaatcagatcaaaggcggcggtaagctccttgcttttggcgaccttaccgtcctctctggcttctcttaactttttcgcggttgccggttccgtcttttctccgcccggtccatccttcgcaaaccactggaggtgatagggaaggatctgtcttctgtcctgttccaagctaatacattccctctatcatcgatacaatcattcgtttcatttctttaaacacaaaatcggaaattcccggaagcagcattaccgtgaggaacaataccgtaagtcccaggagcaccttcatctgcattccgaccgcaaacatattcatctgcggcgctaccttcgccataatgccgaggatgcagtttagtatcatcatgcaggcaaataccggcagcacaatgcggaacgcgatcacaaaagaatccgccatataggttgtcatggactctgccaggctgtcccattgaaacacctgcccgttgacggggattacctgataggaatcaatgagcgcccgcagtacataatgatgcatgttcgtcacgaccatcatcagaagcagcaggtactgatacagatttcccgtgatggtgacctgcgagttggtcatcggatcgaactcctgcgccatggaaagtccgatatccatgtcaatgatatttcccgcaaataaaataatggaattacaaatgtttgcagcaaatcccatgagcaaccctgtaattccttctcttagaacaatcaccgcatatccaaacatgcccgtgtaggtaaccgctgactgatcgaccgaagggaatatcaggatcgacaaaagaaacgataatccgatcttcactctggacggaacatttttcatgccgaaaaacggagccgcgtacacaaagcaggatatgcgaaccagtattaaaatgagtatttcaaaatccaccaacgaaaacgtataatttaacattcctcaacctaacccagatatatactaaagtctgaccagagcgtattgataaactctgtcagattggttagtatccaggaaccaaatatcatcattccaagaaatacacagataatctttggcacgaaggtaagcgtctgttcctgaatggacgtcaccgtctgaaaaatactgacgaccagtcccacaaccagagaaataatcagcaacggcgccgagcacaaaataattgtatacaatgcctgtctggcaatgtctaatacctgtccttctgtcatttcacttcatctcctgttccaaatgcacgcatcagtaaaatgtctttacaacgcttccaatcaccagattccaaccatccgccagaataaacagcagtatcttaaacggcagtgaaatcgttgtcggcggcagcatcatcatacccatggacataagtaccgatgccactaccatatcgattacaataaacgggatataaatgaggaatcccataataaacgcataccgaagttcgctgatgataaatgccggaatcacggttgtcatcggaacatcgtaataaagctccagtgtcatctgatccggataatcttctccatcaatatccataaataggtgcagatccttttcctgtgtctgaccgtacataaagtcgcgaatcggtgtctccgctgccttgtatgcctcctcaatggtaatgtcgccattgtctaacggctgtatggcatcttcgttaatctgctgaaaggtcggccacataataaagaatgtcaaaaacagggcaagaccgacgagaatctgattcggcggtgctgtctgtgtaccgatcgcggtgcgcaggaaatgcagcacgatgatgattctggtataagaagtcatcataatcagaatggacggtgccagtgaaatgatcgtcagcaccagaagtgccttgatcggcgtggatacggctccggtgtcgttgttgtatgtaatggacaggccgttgttgatatcgctcgtcgcatccgtcagtccatcgctgctatcggtattgctcaagccagtaatcatatctgaagatgtatctgccgcatagactctggtctgtcccatggacaacgtcaatgcgatgatcagcactgccaccgcaaagacaaacgacataatacaatatgatttctttaattttgattttgtcataatttaatcctgttttttcgggaaatgttcctttaacttctcaagcgtctcctggaaggtcatctgacctttttctccattctgtccgggagtctttccgttgcagatctctgcctccgtaagtcccatctcttcctcggtaagctttgcgagcatggtcacattatcttttgcaaccgcgatcacaagatacacatctcccatttttattacctgaaccagtttgttgttggcgatccgtatggtatcgaccacctgaaagctgcgtccggacatctggaccttctgatatccgccaatccatttggttgtgaaataggtaatcacaagaacaaacagaaaaataagcaggacgccaagcagctgtataaaactgttcaggcttgaactgagtaaaatcatattagcctactactttttttactgcctcgagcacacgctctgcctggaacggctttacgataaagtcctttgcgccagactggattgcctcgataaccatggcctgctgtcccattgcagagcacatgataatatttgcattcggatcgatctctttgatcttcttcagcgcctgaataccatccatatccggcatggtaatatccatcagaaccagatccggctttgcatccgggtacttctcaactgcaactgctccattctcagcctccgcagcgatctcataaccattcttggttaagatatccttaatcatcattctcataaaagctgcatcatcgcaaatcataatctttgccataacattctctccttgtttcttttcttatattgttttgcttatattgcttttcttatcctgtttccaatcactttacaatctcggtaatacggataccatagctttcctctataataaccacttcacccttggcaacgtatttgccgtttaccagaacatcgatcggttcacccgcaatacgatttaattctataatagttccaggtgcaaaatcaagaatctctttaatagattttgaagttcttcccaattccaccgttacctcaagcggtacatccttgatcagatcaatgttttccggtccgtatcccaccggaacgcttccggtaaacgcctgaaactgtgccggctgtacatttaccggctgctgtccatacatctgtggcatttgctgtgccatcatcggttgtcccatcatctggcctcccatcatcggtgctcccattgccggctgtcccatctgcggtgctgcctgcggctgtggtgccgcctgcggctgtggtgccgcctgtgcttccggagcactacctttgctgcctgcagtcgaattcgtatcttcctccatattctgtgtcacactctcacacatttcctttgcaaaaggaattggatacagctgcatgatatcactgtcgaccagatcgccgatctccaatctgaaccgtatctttacaaactcgcctgccaggaactcatcgatgacgctctcatcgattgtctcctgtaaatctatcaaatccgcctgtggcgggctgatatcaatcaccttgttcagcatagatgacatggatgtcgctgccgaacccatcatctggttcatcgcctcgctgatcgcactcaagtgcagttcaccaagttctccatccgtattagttccatcaccacccatcataagatcagtgattacttttacatcgtgttcctttaaaaccaatatgttgctgccatccagtccgacagtatatccgatccggataaacacacatggcttctcatatgcttcacagatatcactccagtttgcgaaagaaacaactggagtcgagatctctacttttcggtttaccagagaaaacagcgtggtcgctgccgttcccatactgatattggcaatctctccgattgtatctttttctttctcagtcagtacctcttctttgggctgctcgctgctgtcctcagacccgttcagtaatgcattgatctcttcctgagacattactccatccatacttactgctcctctctgattactgatgtcactcttactgcataattatcaccggatgctcccggcagagcagtaaatttttttatatttccaacatacaccgacagatcctcatccactttggtgtcgagacggataatgtctcccacctgcagaccaaggaaatcattgactgatatactgctgttacccagcacagccttgatcggcatcggtgcccgtgcaataagtgcctcaatggtctctgtatattgctgttcatccttctcctgcaggctggaataccagtattttgtattcagcttgtccatcacactttccaatgtgatatacggcaggcagatgttgatcagtccctcgacatcaccaatcttaatattcaacgtaattaacgcgatcatctccgtcggggaaatgatctgggcgtactgcgaattcgtctcaatccgctccagtctcggtgtcagttcacacacactcgcccacggttccaccagaagattcacgcatacgttatagatccgctcaatcagaagaagctcgatttcggagaactccctcgtcttgtcaagcggcgccccctggccgccgagcatacgatccacgatcgtaaagccgacattctctgcaatttcaataatgatattgttattcagcggagcaaaatttacaattccaagcaacaccggattcgatagtgcattcgcaaactctgaatacgtcaccgcctccgaactcatcacttccacctgaacattttttcttaggtacaccggcagattcgttgaaagcaatcttccataatgttcaaaaataatctcaagcgttcgcaaatgctcttttgagaacttcgcgggacgggcaaaatcgtaatttttgacctgtttttcattatcatcttttatttcatctacatccagttcaccgctgctaagagctttcagcaaactgtctatctcattttgagataagacttcacccattctctctcaccacctactgtcttattctagtgtgcttccgttgccacgcttgagaaattcacgcccacgatatagtcggagccgaacagatcctgcatcttggataagatctcctccttcacagccttctgtccatctgcgttgaactcctcctcggtatacttggccactaccgtattgatgtcgctgcggataatggtctccttatccgtaagctctgtcatctcgtctcccccgtaggtggcataggactcgcttgtcttgttgacggaaagtcctacagaaaatacagcgtaatgcttctttccatcgccgttgtctgccagattcacggtaaaattatctgtgatattataaactgcaatttcttcgatcggcactgcggaactgtctttgttctgtccgccctcgagttcgatgttgattgcagcgcacacctgatcaatcagttcgtttgactttttggtctgcggaataatggaaaataccagcaccgcggtcagaatcagattcacgagaaccagtgccaaaataattactgccaataaatttttcttcattatgcttcccttcctattcgttcacaacttctgtcggttccacagtcgcacctgttgtcgctgcttccggcgtatctgtcaccgtctcagtgcttaaagccgcatccgcaggcgtctctgtacctgtgtcatccgtggatgtcccgctcacattcgagttgtatgagttatagattttaatctcaacccggcggttccttgccctgccctccggcgttgcattatctgcaatcggcacatactctccgcggccagacgactttatgtatgcaggatccagtgttgtggtatcccgcagatagttggcaaccgcaagcgcacggtacatggacagtacgttgttgtcctcatacttggaagaatgaatcggcacattgtccgtgtgtccctcgacctcaatgatgttattatcgtaagtaaccagtatcttgccaagcttgttgaccagcggatacgcctcatctctgagttctgcgctcgcagaatcaaacagcagcgcgccgttcatgttaagcgttacatactctgcattaaaatcaacctcgacgtcgtcctgtatcccatattgcgaaagtgcattttcaagttgctgcgccatatcctcagactcttccagttcctgctgttcatatgcttcggtaatgtctttttcttcctccgtctgtccgtcagactggctgctcagctgctggttgtaataagaatcaaaattctcaagctgactgattccggaagaaatcaattcaccctcgccgatcgatgctccgcctcccgggagtatgctgaatgtactctggaaagaggcaatgaccttctcaaacttttcctcattcacactggacatggagaaaagcattacgaagaaacagagcaggagattcataaggtccgcgaaggtattcatccatgcaggtgagcctttgggtggatcttcctttcttctcgccactattcctcacctccgacactgccctccgcagtttcctctctcgctgaaggtgacaggaatgacttcagtttttcttctatgacacgtggattctctcctgcctgaatcgacagaataccttccaccgtaatttccttcatcatcatctcgttattattgtttacagaaagcttggatgccgtcggattacacagccagttggcaatcaacgaaccgtacagtgttgttaccagtgcgactgccatcttcggtccgatcgttgatgcatcattcatatccttgagcatcaggatcaatccgatcagggtaccgatcataccccaggcaggaccaagttctccccatttttcccagacagcgattgactttttgtgtcgctgctcgatacagcccagatccgtctccatgatacctcttaccagttccggatcggtaccatctaccacaagcatgattccttttttgaggaattcatcctcgattccgtttgccgcctcctcaagtgcaagcagtccctccttgcgggcggtatttgacaaatcaatgatattccggatgactgccgcaggatcctgcggtacctccttaaatgttaatgtaatactcttcagacctgcaataaaatcctgaagtttgttggacgccaatgtacccgatatggaacctcccagtgtgataatgattgaagggaagtcaaacatattgaaaagacccgaagctccaccactggaaaatacaccgaacaaaaacattacaacgccaagcagcatccctgctaaagaagctatatccaattcttccacctaccatccttgatattatagtattgctgtctccaagcggagactgaaatctcaacaagttgtcatcctatatcttgtataattttactaaacttttgaccgcttgtctacttacttttgcaaattctgtgtttcttctttcatggaaccgggattttatcagggagacaaaaccccggttctccaaaatcttatccgtgatgctgctctgtcatctcgcagccgcttatctcttcaggttcacaagctcctcaagaagcgtatcggatgtcgtgattacacgggagttcgcctggaatccacgctgtgtggtaatcatctgcgtaaactcggtggagagatccacgtttgacatctctaactcgccggatgtcatcttgcttccgtccgccgtaatatcctcaccgataccatcgaactcaccggagttcaaggtcgtgctgtagcagttctctccgactttctcaagacctgccgcattggcgaactgtgcgaccgcgatctgtcctaacaggttgcggttaccgttgtcataaataccgtagatctcgccgttgttgctgactgaaagtccgatcaggttaccgagcttcttacctgctccagttgttccgtctgtagcgcctttgctcatcgttacagtggacttgccgccgttgttcgtattctggcaggtgctgaagtccacattgatatttgcgaactgtccgccgaacagggacatgttcagtccaacactcttcgcatccgccacgtttccaacctttgaaaatgttccatcgtccgtgttgaagcttaatctgtgatatacactgttgtatgtaagtgtcagtgccccggttgttccgtcaaccgcatatccggtgccatttccggtgtaagcatccgctttcgccagaatgtccgctcctgcaccgtatacctgtgtcaggctgagtgcccctgctgtgacaaccgtcatgtccgtcgcactttttacctggtcatagctgtgtgtcgctgcattgtactggtagtaattaccgctcttgtccacgatgacgttagcggacacataagtgtaatccttgccgagcgtataactctttgtcgcatcctcggtgttaccgaacagtgcgtttaacgccggctgtcccgcctgaatattctcaggatcgtagtaggtatttccgtcgccgtctaaaacattcaacagctctaccgtgaactctccgtccgttccggttgacttaatggaaaaacgtgcggtgtactcatatcccaggttatcgtagaacttgaggttcttgatcaatccgtcgtcactcaatacgtcggtatcgttcttatcaataataccgccgcaggttgcctcagaggttgcctctggtgcgcttgtcagattctccgtgctcatgacgcgcaacgcggatacggtatctttccggatatttccggttgtcttatctacctgccatcccatgaccgtatatccggtagacgtcatacacaggttgcctgcaccgtctacatagaaagatccggatctggtaaacagattggaagatccgttgttgacaataaagaaattggtggtcgactgatctgtcatacgcagatcgaaagctcttccggttgtctcagctgcacccgcggatgtaatgctgatatttaccgcacctgtggtcacgccaagaccgatctgcttggcattcacaccgccgactcccgtagccgcatttgctcccgatgctccggatgtgttctggtagagcatatcctggaatgtcacggaagaagacttgaatgctactgtgtttacattggcgatattgttaccaataacgtccatttttgtctgatgtgtcttaagacccgacacagcagagtacattgatctcatcataatgaaatgacctcctgtaatgtctggtgccctgctcccttctgtcattcggggagcttctgcctccttgtaaggtccggcatattatacaatcacggcaccgtcaatatttgtaaaaatattactctctgactcactctgatccatggctgtgaccaccgtcttgctcggaacattcacaataaacgccagtgaatccagaatcacgagtgattcccgtattcccttttcgcttgccttcaaaacaccggattccagtctctcgttctgctcgtccgacagattgatgtgtctgtcattcaaacgtccctgtgcatgtttggaaaaccgaagttcctgactttctgcggtcgtctgtttctgtcttaatatatcctcgaaagaaacactgttttcctgcgccgcagtctctgtgcttttgcgattcagataccggtcagttacctgttcgatggaagcaaattggttcgtaatcttattcataaccaacgctcctttctcagatcattcggctttcttctcaagctccgcaatcttagcctcgagtgctgtcagctgatcgtaggaatccttgctgatataagtcttctctgtggtggtcagcgaatcgtaattcttgcgaagtgcttccactgcttccttgttctcaagggtcagctcgtccgcggatggaatctgcgaaagcgcattgtcaaataccaggctcttcatggttccgtccagcttcacaaacgttgccagcgtatcgctgtcaatataactctgctgataagaagtcagtccgttgtacacggttgccaggttctccacatccgtctgatatgccagcgtcagcttatccgcatccggaagctttgccacagatgccttgaatgcctctgccagtgaaaccgcctccatgtactcggtgtctgccacctgatatacatcgtcgagtgaataacggttgccgttgacataaatgtatttctggttgttctcgtactgcacataatccacgaatcctgccaccgccgtcgtctcgccggtcgtctcggatgttgtctttacaatgacatactttccaaccagatcgtttgccttcgtgctctcaatgctgttctgcatgttcagcatggactccatctgtgaaaaagttgccagctgtgccacatactcggtattgctcgtcggttccagcggatcctgatactgcatctctgcacataacagctgcaggaactcgtcatatccgaggtcattgccggcactggtcgttgtctctgtcgtactctctgtaatcttgccgttctctacggcctgtactaatgccatatgtctctcctttctgtctgttatgcggtaaagtcaacggaattgccctgttctgccatcatcttcgccaccagagtctcctcttccgtcatcagcccggacagtccgtccagttcattcaggttgatgtgtctggtcgcattggctgccttttcccgttcctctgcctgctgttcttcctgttttgcattctgctccaggttcttctcaaactcatgtccgccgacggttacctccacggcatccaccttcacgcccgcctggttcatgttctgcttcagatctgcaatctggctttccagcgcctccttgaccacttcattctgtgcggtcagatgtgcggaaactgttccgtctttggatgtgatctccagataaatcttgcccagatgttccggattgagctgcatctccatcgttgtttcctgattcgccgtgtaattcactctcgtataggtcacgatctgacgcacgacatccgcgatgtccacctgtgcggcatattctcccgcactattggcgccctgcattgccacggtctctgtcagcgtcgggccggtatgtacatccacgcccgcatgtgcctgcgacgcaaaatcctgctgtccggaattggaattcgatccggtctgtgcctgttccttgcccgtccctgcagctacatcggcaactgtctcttcctctgtgccggcatctgccatcttagcctgcgcatccgtctcttccggagtgatgtcttttgatctaactgcccggggctctgtctctgctacggctgctgtctgcggctgctctgccgtatcacggattccatccgccgtatcggcgtaaaccctccgtgcatctgcggcatctgctgtctggactgtctgcatcagatctgcattcatgtccgcctgtccggcatcctccaaaagctgcgtcaattcctcagccgtgactcccagttcctgcaagagatcttcggtcagtgttcccaccgactgcatcacgttcataaacgcttcattacagagaagtgcgctcatgtcttcggttccggttaattctgccgccagagctgcaagctgctgcggattcatcagatcggccacggtcagtcccaatgtctccattgcttccgtgatctgctcatccgtcacctgaagttcatccttgatgacgtctctcacactctcttcaaagctttccagcttctctgacacctgactgccggctgtccagtccttcgtgctttgctccggtatcttattcttctgatactggtaacggtcataattctgctccggactgtgcggtgtaagctgctgcatattctgtgctgtctgagatcctgtacttacgctgcttcccgggatctgtgtcatctgatcgaccatcttccggaatgtggtgccgatatccgcgccatcaacgcctgtgacactctgtccactctgcgtctgcatcagcattttcccaatgcttgcaacattgttgtctcccattctcttcctcctttcccatagctgcacctgcagcctgatttttgaaggaatccctctgccattatgaaaagcagactgtccttctctattctacaggttccatgatcgcggtcacctttgctgcagtagccgcgtccattttgcccagaatattcgctctcgattgtgcgtccatgctgtctaagatatctgccaccagctgcagattatctgtcatggtatcaaaaattgcagccgcctcttttggcttcatggaagagtacgctttcacataatcatccatctcgtcgttggctgccgtctgttctacaacctgacggtaaatgatctccgcatccgcaggatcaatgctctcataatactgcttatattcctctatatcgggtgctgaatctgaaaacacaacctcctgatagaacttttgcttctcagcctcaaaatccgcctcgttctgcttgtactgtgccagttctgcggactggctctcaagctgtgcgatatattccgcatttgcgctggacgtattctgtgcatccgcaagttctttctccagttccttgattctggcaaccgcatcgtcaatggaagtatagccgtaagcgtcatcctccgttgacacttcctcagtcgcgctgtccggcaggattttgttcacataaggaacatcctttaacaccggcgccagaacggatgatccgaaaccgccgacatcgcacttgatcaacaggacgatgatggcaagccagattaaaataatgatcagggtaacaaagaacacggcaatcttgccgccagtcgatgtctcgtcatccatatccagatcatcatttaactcttttgcctttttccggtccgctttcttctgtgccttcgcttctgcacgtgcagccttctcctgtgcctttgctgcctttttatctaatacttcgtctttctcttcttctgccatttgagacctccgtgcctatccttcatggtaattgtagctaacaagctcgtctatttccttgctctctgcctgggcgatttcctgcttaaattcttcaaacgcacgctccctgagcttctcatgcgtctttcgctccaccatcacccggttcagttcgattcgcgccatctccagcgtcttttccgcggcgtgcaccttcatcatctgtgctctctgcagactcttcatcacatcgatcgcacgcttgcattcccggatctcctggatatccagcgttccgttgaccagttcttttgattttctctcgtagccggccctgcgcatcaggatctctcgaagcttctcctgctcttccgcaagctgtctgctcgccgtcgcatatgcaatttttgcctgattctccagcttgatcttgatgtcaagaatgttctgcatccggtatgtaaactttgccatacactgcgcctcttttccgcggagcgttcttaatcttcaaatagtttcttcaataaatcgatttcctcgtcaaacaggaacttttcatctgtcctctggcacaggaactgattcactgcgttgatcttctgaaccgcatagtcaatctcacggttggaaccgctcttgtaagctccgatgttgatcagatcctccgcttcgttataagtagccagtacattctttaaacgtccggcaagctccttgtgctcgctggtcgctatggcgctcataacacgggaaatactctgtaaaatatcaatcgccgggtaatgattcttgtgtcccagttttctggaaagcacgatgtgtccgtccaaaatgcttcgggctgtatcggtaatcggctcattaaaatcatcaccgtctactagaacggtgtaaagtcctgtgatggaacccttgtccgaagtaccggcacgttccagaagcttcggcatctccgagtatacactcggcggatatccccttgttacaggcggttctccggacgcgaggccgatctcacgctgtgccatggagaatcgggtcaaagagtccatcatcagcagtacatcttttccctgatccctgaaatattcggcgattgcggtcgccgtcttcgcagccttgttacggatcagtgccggcttatcggaagtcgccaccacgacgacggaacgcttcattccctcttccccgagatccctctcgataaactcgcgcacctcacggccacgctctccgatcagggcaatgacattgatgtccgcttttgtattgcgggcgaacataccgagcagggtgctctttccgacaccggaacccgcaaagattccgatacgctgtccttttcccacggtaatcagcccgtctaccgcctttacaccaagcggaagcacctccgagataatcttacggctcatcggatccggcggatccgcctcgaccggatattcgcatccgccctcaatgactccgccgtcggtcggtcttccgataccgtccagtgtgtgtcccagaacgccgtccccgacaagcaccccaagcggatgtccggtattctcaacgatacatcctaccccgatgccttccacattttcaaacggcatcagcaaaagtctcttatccctgaatccgactacctccgccatcaccgcgtggtctttctctctgtcaatgacaattctgcagagatcgtttaactttgcatccggtccgacagattcaatcgtaagtccgacaatctttacaacctttccaaggcggttgaagtaggtcttttctccaagttgtaaatatttttcaaattgatgtgtcatcattctctcaccttacgaacataaagaccggatatctttgatcagattctcaagctgtgtaccgagactgcagttaaacacgccggaatcggtctctatcgtacagtcatttccctccaccgtcgcgtccgagacaatctcaagctcaatgtcatgtcccacacgatccaggatctcggtcttgtgattctccagaaacagtgcattgtcctccgccaccttcacccggaaccgcttgtcgtcttcaatatttaaaatggcatcttcaatcagatgcatcagtatctcttttttgtcgtcaaactgaatatggaacactttttcaaagacggtaacgatgacatccaccagatcctgttccatatgttcgcgtttgtccctgtaatcgctgtcaagatctccctgctttttcctgtaggactcctcaagctgcacgcgaagctgctcattctcctgctccgccgaagctctgccctcctcgtacccctgcgtctttgcagatgtacggatctcctcggcatcttcgtttgcctgtgccagtatcgcatcggcattctgctgtgccgccgcaaggatctcctcggcttttgcctttgcctttgcctcataatcaatctgcggctccgctttgatgacctgacccggatcacccgtcacaagtccggctgaaaatccgccttcctcttcctgcacattctgtgccggtgtctgtgtctgcggcagatcctgtttcaggtgctgctgcaggatcacattggaatcgatgatgcgcgtgtttgtggaatccgtctgaacaaaccactgtttataaagattagacaacgatctcgtcacctccgcctcttgagattacaatctcgcctgcatcctcgagtttacgaatgacgcttacgatcttctgctgagcctcctcaacatccttcattcgcacaggtcccataaactccatatcttccttgatcatcgcagcaagacgtttggagaggttcttaaatataacattctgtacttcctcgttcgccgccttcaaggcaacgccaaggtctgcattatccacatctcgcagtacacgctggattgcacggtcatcaagcagcagaatatcctcgaatacgaacatcttcttgcggatctcgtctgcaagctccggctcttcgatctcgagagactccatgatatgtttctcggtcgaacggtcgactgcatttaagatgctgacaatagcgtccacgccgccgacgattgtgtaatcctggttgaccagggaagaaagctttctctcaagtacccgctccacttccttgataacatccggcgatgtacgatccatcatcgcgatacgttttgcgacatccgcctgtttttccggcggcagcgcccccagaaccatcgacgcctgcggtgctgtcagataggacagaatcatggcaatggtctgcggatgttcgtcctgaatgaagttcagcagctggcttggatctgtcttgcgcacaaactcgaacggacgcacctgaagggatgctgtcagcttggagataacctcctgtgccttgtccgcgccaagcgccttgtcgagcagttccttcgcataaccgataccgccctccgcaatatactgctgagccagacagatctgatagaactcgtttaagacatcctccttgacctgcggtgaaatacttctggtatttgcgatctcaagggtaagttcctcgatctcgtcctccttaagatgcttaaagatatctgctgaccgctccggtcccagtgtaatcagaagaattgcagctttttgcagtcctgtaaattcctcgttttttgccatattactcccactcctcgttgagccagttgcgcagtaacgatgcagccgcctccggtttttcttctacgaatttttcgatcagtaaacgcgtctcggacttctcattgtagccgatgtcctcaagcggctcctggttctcttttgtggattccagcaggctttccacggaaagttcctcctccatctctgcctgtttctcctttctggtgctgcggaataccacataaccaagcaggagaagaatcagtaccgcaagtatgatctgcagataatccgacagggttcttccaccggaagaatactggaaaatcggctcgtcataagcgatgatgctgatgtttgcctcaggaaaccccgttgcgttggcgatcatcgtgtaattatcctgatccaccgtcgtcttgaccgggtcactgtttgccgcaatatactcgtcaaatgtcatgttatccagcgcaccggatgtcctgagtgtgtcctcatcatagatcacataattttttaccacgatcgcaatggaggaagtatcgtaattgatcgttccggtcgccgccgtgcggtccgtcactttttcattgttctgatactttgtcgtggtatcggtgatcgtggactcggtataattgttatcctcaatcacataggatgtatcgtcattggaatctgtgcccggtgtggcagctgcgccgccgacactgttcgactcataattgctctgctcatcgatcataccgtttgtctgaccgtctggtgccgaatactgtcgctccgtctcgcggtatgcgtcaaaattcatatccagctttgccgccacttccgcatgatcataaagtcccgagccgaccagaacatcctttacctcgctctttagcagattctccgtcttagttctcagagagagctggctgctcgcggttccgaccgacgaatcagaatctccgcccgaaaaaaggacattggagttcgagtccagaatcagaacgttgtccgtcgtgtcattgccgagctgtgtcgctatgtactgtgccagtccctgtgcctgctcgtcgctcatatctgaattcaaggtaagaattaccgccgcgtaggaatcctgctctcttgcaagaatcgtgccatcatcattcgggatgtccagtgtcacagacgcgctctcgacgtttgacagtgtctccagctgatctgcgaaataattctccagatacagcttgtatttcttggtcttgtccgcctcggtggagctgaatccgccgtcaaacacattgtcaatggaaaatccttccgtcgggacaccgttctgcccaagcagaatcgacgccgccgcattgtccttttcatccacatagaatgtcagcccgtcatccgacatctggtaggagatgcttccgtcattgtccagaaggtcttttacttcacccgcctgcgctgtggaggagcactcgataagcgttaccatgttcggcttcccgacaaccaccgccagaatcaccaatgccagtataattaccgccacaatgcttccgagcaggattctctgcttggttgtaaactttttccaccaatccgttatcttcgttaaaatcttttgcacctgttccggcataatttctaactccattcattaaatctgcatgttcatgatctctttgtacgcatcaagcatcttatctctcactgcaaccgtgtactgcagcgcctcatacgccttggctgccgcaatctgcatatcgtgaggattgtccgcctcgcccagcgcgaactggatctttgccgactgcgaatcattctgcagatcattcgtctcgttgagcatattgattgccgaagacaacaccgagtcaaagctctcatcggtgtccacagacaacagtgtcttctgtgttaccgcactcatgtaatctggtgaagtggcattcgtcaataaactgatatccatctgtatttcccccgtttcatcctaatctatgtcttactgaccgatcttaagtgctgcctgaatcatgctcttgctggcattaaacgccgtcgtgttcgcctcatatgcacgggacgcgtcaatcaggttcgtcatctctgtcaccgtattcacattcggataacgcacatagccgttctcatccgcatccggatgggacggatcatactccattgtaaaatcggtctctgtatcttccttgacggaggtaaccttcacgccgttgcctacagcccgcgctctggatgactgataatatttgctgaacggagtcagatccttttccgcaaacgtcacaatcttgcggcggtacggttcaccgtcctccgtacgcgttgtattgacattggcaatattctccgcgatggtgtcgatgcggaagcgctctgccgtcataccgctcgcactgatgtcaaaagactgaaataatcccatatgctacctcctgtttatttaagcactaatttcatacgattgaattcttcgttgatcgatgtcgtcagcatctcatagcggagctgctccgatgccagttccacctgctccgtatccacatccacattattgcggtccagacgataggaataattggaggaatccgtataggtagacacatctaagcccgaaagatccgagttcagtccccgcactttcttatccagcggaatatacttcgagctgccaagctcccgtttcagcgcagattcaaaatccacatcctgtctcttatagcccggagtatccgtatttgctatgttgttggaaattgccgactcacgtttccagctggcatccgccgccttatccatgatgttaatatagtcgaacgcattcgtagttatcatatgtatcgccctccgcttcacctagttttccaaactatcttattccattataaaatatggtttcgtaattgcaagagatttttgttattttttacactatcttgtagatttttgcataataagtacaagatattagcaaaattgtcaaataaacccgcataaaaagccacgttccacggaaataaaaaagagcgcacccttcgatacgccctttcgtcctgtttattttttctgattctgctttttgatcttgtcgagttcgtcgaatacaacgtcgttcaatactttgatgtaggttcccttcatgccggaagagcgcgactcaatcacgcctgcactctcgaacttgcgcagtgcattcacaatgacggatcgtgtgatacccacgcggtcggcaatcttgcttgccacaaggattccctccttgccgtccatctcatcaaaaatatgaatgatcgcttccaattccgaaaatgacaacgtgctgattgcagatttgacaatctgaacctttcttgtctcctccgcattctcctcattcacggagcgcatcatttccagaccgaccacggttgtcccgtattcgctcaaaatgatatcgtcaatatcgtactgtctgtcttctctgtagacaaacagcgtgccaagccgctcacccgcaatatcaatcggcgtgatgatcgcagtgtattccttcacgtgatctacgaaacctaacgtctcaagattgacattctccttggtagagaggattccgagcagacgttcgtttagcagcgggtcgatgaaacctcccacctcgtccacgatcaattcctggatctcatccactccgggacacacgcccgttccaagaacctttccctttttgctgatgaccagaatattggatgcaagaatatccttcaacacatcgcagatatcattaaacacgacctttgaagagctgttattgtgcaacagcttattgatttttctggttttgtccaacaattgaacactcatgtccgtgcccccatttcgtttcgaatctctttttcgttatatttcatattttaacacgtcaattctgaaaattcaatattttcgtaatatttgacatatttttttaactattttgtatcctcgtccgcttttctgtcacgggtgtagccgcatcccgcatctgcacaggcgatcttattgccttttaccaccatatagccgccgcacttcgggcacttctccgctaccgggcgtgaccagctcataaaatcgcactccggattattctcgcagccgaaatactttctgcctttcttcgtcttgcggaggacaacgtcttttccgcacttcggacatggcacgccgattttttccagatacggcttcgtgttcctgcactccgggaagcccgggcatgccaggaattttccgtgcggtccgtattttaccaccatgtttcttccgcactggtcgcagacaacatccgtgacctcgtcctcgatcttgactttctgcagctccttctccgccacttccaccgcggcttccagatccggatagaaattccgcacaaccgtcttccagttcacagcgccctctccgatgctgtcgagcagcgactccatattggcggtaaaatgctcatccacgatgctcgggaaggattccttcataatctggttgaccacctctcccagctccgtcacatacagattcttcgcttccttgacaatgtaacgtctgccaagcagcgtcgtgatcgtcggcgagtaggtactcggacgtccgattcccagctcctccagcgtcttgactaaggatgcctccgtgtaatgcgccggcggctgtgtaaaatgctgcttctcatcgaaggtgtccagcgtaagcttcgtatcctcatcgattcctttcagcagaacattgttcgtgtccttctcgtcgtcctcgctcgtgtacacagacataaatccctcaaaggagacctttgatgccgcgacaccaaagcggtactttccggcaccgatcttcacgttcgtcgtctcatatatcgcagaagccattctgcttgcggcaaaacgcttccagatcagctgatagaggcggaactggtctctgggaagagattccttgaccaccgccggtgttctcgcaatgtcggaaggacggatcgcctcatgcgcgtcctggatcttggcgccgcccttctgggtaacggtctgtgtcgctacgaattcttccccgtaattctgtgcgatatacgctctcgcatccgcatccgcctcatccgaaatacggacggaatccgtacgcaggtaggtgatcagaccgaccgttccctgtcccttgacgtcaacgccctcatagagctgctgggcaatacgcatcgtcttggagatcgggaaattcaatgtcttggatgcctcctgctgtaaggtactggtcgtaaacggcagcggcgctttcttcacgcgctcaccctttttcacttccaggacttcaaaccgctctccgcggatctcgtccatgatacggtccgcctcctcgcggcaggtaatcgccagttttccgttctcatccccgtggaactttgctgttaacggcttcttttcgccgtccgccttgagctttgcatccagcgtccagtattcttccggaatgaatgcattgatctcgtcctcgcggtcgcagatgatgcgcagcgctaccgactgtactcttccggcgctcagcccacgctttacttttgcccacagaagcgggctgatcttgtaacccacaatacggtccagaatacgtctggtctgctgtgcgttgacaagattcatatcgatatcgcgcggctgctttaaggacgccttgaccgcgttctgcgtaatctcattgaagctgattctccgcacattcttgccgtccagctttaacgcctggcttaagtgccatgatattgcctctccctcacggtcggggtcggttgcgagatacactttgtctgcctttttcacttctttacgaagcttggcaaggatatctccctttccgcggatcgtgatatacttcggttcataatcatgctcgacatcgattcccatctggctcttcgggagatcccgcacatgcccgtttgaggcaactacctcataattttttccaagaaactttttaattgtttttaccttagcgggtgactcgacaataacaaggtacttagccattcatacatctcctttatgctgatttctcaaatccgtctgatataacaattcttaaatgcttccgtaacaaacccctttttcagaagaatccccagaatctgcgccagttcgggcacagacaggtctgtctcctccagaagttcttccatacttttcggtcgtaaatctacacaactatacaccaagcgttcttctttttcaagtaataatttttcaaaggtgcatgtctccccgcccgctccgggatccggcgcaagctcctgtacaaacgattcgagatcggaaactgcccccgctccctgccggattaagctgttgcatcccgccgacaaggcatctgtaatcctgcccggaatggcatagacatccctcccctgctccagcgcaaaatccgccgtgatcagcgatccgctccgctgctttgcctccaccacaacaaccgcccggacaagccctgatatgatgcggttgcgctgcggaaaatatcccggaatcggctgcgtgccgggcggatactccgagacaaccgagccccgttccagaatctcctcatacagcgcccggctgctcttcggatagcagacatccacgccgcaccctaagacggcgcagctgattccgcccacgtcaagtgctccctgatgccccgcagcatcgatgccgcgcgccattccgctcacaacaccgacgccgcgcgccgcaagcattctcccgagctcccttgcaaccgtccgcccgtattcggagcacattctcgcaccgacaatcgcaacggtctctccctgcgggaggcatccctttacatacagtccgtacggcggatttgcgatatggcggagcctctttggataagatgcatcctccagcgacacaaacgagatcccggattcacacatcttagcgtacgcttcctccatgtccgtcttttgcgcagcccggaccgcctgtatttcttttgccaataattgcatattttccatctgtttttcgctaaggaaatagatatcctgtgcattcccaaccttttcatggatactgattttcgcacagttggaaagtccgggaatatttgcaaaccaatacgcataattcatctcttcacctctcccagaactttctgtcaaagcttctgtagcagattgcctcctccagatgccggtcgcaaatccgaccgccgccgtccatatccgccagcgtgcgcgccacccgcagaagcttatggtaagatctggcggtaagctgcagctttccgtagatctcttccatatactgctcctgctttttatcaagagcacaatactcccggatcttcgtggcaggtatctggctgttgtacgaaaatccttccttccggtagcgctcccgttgaatgtcctgtgccaccgccacgcgcttctgaattgccgccgatgtctcctctttttgctgtccggttaattccccgaatgtcagcgccggcgcctccacacaaatgtcaatccggtctaagatcggctggctgatcctctctaagtaccggtggatcgccgtctgcgtacacctgcatttctgcatatcgggataatagccgcacgggcacggattcatcgccgccaccagcataaaatctgccggatagacataacttccgccaagacgcaccagatgaaccgccccctcttccagcggctggcgcagcgcctcaaccgtctccctggcgaattccggaagttcatccagaaacagcacgcccttatgtgccagtgagatctcccccggttgcgggattcttccgccgcccgtaagcccctgcacactcacggtgtgatgcggcgcccggaacgggcgctgcgtaagcagaccgttctccccagaaagcattccttttacactgtagattttggacaactccatgcgctccgcctccgcaagcggcggcagaatggacgggatacgcgatgccaccatagtcttgcccgcacccggcggtcccacaaacagcagattgtgcattccggttaccgcaacctcacacgcccgcttcatcagccgctgtccgtgtatctccgaaaaatcgggaagcactgcgggctgtgtttcttctatattatattcctctgcggcgtacttctcccacgacgcatcctcaagaagacgcatgacctccccgatattttccacaccgcagacaagcatcccggaaacaagcgccgcctcttttcgattcgcccgcggcacaatgcagcgccggattccgcgttcctttgcctccgccaccatcgggagcacgccgtgaaccggctgcaccacgccgtttaatccgatctcacccacgatcagcacatcatccagtaccgcatgcggaagccttcccatcgcagccagcaccgccactgcaatcggcagatcaaacccggctccggatttgcggatgtccgccggcataaaattcacggtaattctgcgcggcggcagcgcacaccccacattgcggagcgctgtgcgcacccgctccctggcttctttgacctcagacgccagaaaaccgaccatctcaaaaacaggcatcccgtcgctcacatccgcttccacgcagacaggcacactctggataccgcgtatcgttgctgttgctactctgctatacaacctgttctccttttcattatagaaagatctggaatctctgtgcagtgaacactgctgaatatcttagaaaatacatttgttaaaaagacatgtttagtataacatcatttgtagaaaaagggaagcggcaatttatctcccgccccccgcgctttccattccttttcgcagtttttccagcgcccgtttctcgattctcgacacatacgagcgggatattccaagcgccgctgcaatctcacgctgtgtcatcggtttacaggcatagagaccgtaccggttttctatgatatagcgctccctgccggaaagcagcttcggcacaagtgccagcacctctctggtgcgtctgtcggtctcgatcgtctccaccacatccggttcatcgctctccacaatatccagcagatgaatctgattgccctctttgtccgttccgatcggttcatacagagagacctctctggccgtcttctttttggaacggaaatgcatcagcagttcattgtcaatgcatctcgccgcgtaagttgccaggcggcttccgtaatcttctttataagtagagattgccttgatcagaccgatggttccgatggagatcagatcttccatatcttcatcggaattctgatattttttcgccacgtgcgctaccaggcgcatattccgaagcgtcagttctttttttgcctcaaggtcgccgtctttcatttttttcaggcattccatttcctgttctggtgtgagcggagataagaaagttttcacaacgcacctgaaaagctttattgatacattctatgtatgggccatgttttccgtgcttttcccctcttttttccgcaaacaaatacatgccgtctttacatctcccccgccgcttcgctataatagcgttacatgaaacaggaggaatttttatgctgcgcacccttacctaccgcattttatccgccacggacgggcagaccattctgcattatttaaaaagtctcggctattccgggccgatactggtacatttaaagaaaacagaccacggcaccctcttgaacggcgtgtgggcgcatatgaatgaaacgcttcacaccggcgaccttctctgtcttcatctggaggagaatacttccggcacctccatttttccgcagcagattcccctcgcgatctgttacgaggacgaagatcttctggtgattgacaagccggcaggcatgccggtacacccgtctgccgcgcaccagagggatacgcttgcaaacgccgtcacgggatattaccgtgcaaaaggcgaaatccgcccgttccgctgcatcaaccggctggatgccgacacgagcggcctgatcatcgtcgccaaaaatatgctctccgccgccctgctcggcaaagccatgcagcagcgtatgatccgccgggaatacctcgccgtcgtatgcggcacgctcaccggaagcggcaccgtccacgcgccgattgcccgcgtaaaaccgggcgatgtccgccggcaggttgattttctctgcggggatgatgccatcacgcactataaaagtctcttatgccacgccccctattccctgctctcccttcatctggaaacggggcgcacgcaccagatccgtgtccacatgtccgcgctcggctatcctctggcaggcgaccagctctattatccggcattttcagacacaaaaataaaacggcaggcacttcattcccaccgtttgtctttttctcatcccgtcaccggggagatgcttacgtttacttctccgcttccctgtgatatggctgcgctaattgatccagaaccttctgctcataggggatcttccctgccagcagttcttcgcggataaatgtattgacttccggctcgccccggacagcgagccggtacaaaagcagttcaagaagcgcccgcgtatccttgtgcatgacatgaaaatcctttccatgcaggtaatactctaatgcgctccggtcggtatagcgctccttctggtaatttttcgaggccgctacacggtcgatatacatctccaccacgtaccgcagaggcattttcatgccgcagagtcccttgtccccgccctcgtccggcacgccgtagtcaatccagtattccatgtgatgcttgttccgccctttgtggtgcagccacgcggacgagtatcccttatccttgcgctctgcattgttcgggctcattgttccctgataatatttacagcccaccagaaattctgtcggcgtatatttcgacagatcatgtaataatccctgtttgtataaccccaccgcaaaacagcctttcatgaccagatgcttgtgatggttgatcgtgcaaaaatgtttccatgctttcataataatgtaaccttattttcctgttaatataacgacagactgaccgcaaagttcgatccgcggcgcatccacccgctcctcctcttttaggaacggtgcccgctctctggcggtgtccatcagcagataccactttttcttcccgggaagcttcggaagcgccaatctggtaggacccatgtgaaaattgcaaccgacataaaggaatttctccccctctgttccatcgccatcctcttttccgcagtagagcatgcccaaagactgtctctcgccggaaagatctgaaatccacgcattctctccgtgataggacaaatcgggataccccgttccttttgcatcggaaagctgttttggcatatccgcggcgagcacgggatgctccctgcgaaacgctgccatccgcgccacaaactcccggaaccacgcgtagcgctcatctttcttccagttcacccagccggtcggattgtcctgacagtatgcattgttgttgccttcctgggaatctcccgtctcgtccccctcgtataaaagcgggactccctgcgcgagaaaaagcaccgccaccgcattgcacatctgccgttcacggattcttacgatccgctgcttgcggcttcgtccctccacgccgtagttggcgctcaaattccagtcgcttccatcccggttctcctccccgttgtcttcattgtgtttctgctcatagcagaagagatcccgcagggaaaacccgttattgtccgaaatgtaattgacaaatccgtgatactgatgctgtttgcgctgctggcatgcaaatgcatccataccgccgttcttgtgattgagcagcgcccggacgggatacagatattcgtcattgtatacatacagatgcggataacggcacgggtgccagagcacagcgttctcgaaaccggcgcagaaaatcttcgtccgtctaagccacgcatcctgtgcaatctgcgtgacgggcagattctcccccagcagatggaagccatccacatgatactccctgacccagtaacgcagcgcatctaagatcagattctgattgacattctcaggaaaatacatctccatcacacattccatgtgattctcatggagcgcgcggatgagttttttccattcgacggccgcatcctgccctttcgcgtaggacgcctttaccgcaaaataattggcgggcgcatatccccacaggttcacacgctccggcatcgcacatgcttccggcttgatctgatcctctttccgcacctgccagctgatatattccggcaataccgccttctcctttaagatcagttcctcaaactcatacaccggcatgaactccaccgtcgtgacaccaagttctttcagatagggaatcttatcgcgcaccgccgcaaaagttccccgctcctttgcagggattcccgcatccatcgaaaatccgcggatgttgagcttatagaggaacatctcatggcgcgggatctccggatgtacatccgtcccccacgaaaaagtgtcatccgaataaccaccgcagacccggaactcattcttaacgcgccctgcgtctctccagcgctctctgccgatgatgcggtttgcataaggatcggtcacgaccgtcccgctgattttataattataacgcaggctctctgccttaagccccgcgacaaagactgaccggatcgctcctctgcagcagctttccggcaccttaagttcctgccggattccgccatctttcccatacagaagaatactgcagtcctcttccttttctgcctcaaacgtaaacacgactccgccgcctgcggctgatgccccgtattgtctgtaatcgccctcttttatcgtatacgccatgccatcttccacctttgtcttcgctgcctgcacgtctgcatctcttcgcaatgcacctacacatcatttcgctgtgcacctacacatcatttcgctgtgcacgtccggaaaatcagagatttcccggactcacgggctttcgccctatcagccatgaattttaaaaaattttgccttcgcaggcaaatttttaaaactccctgtctggcactgctcaatagccttcgcgtacattatatcattcccgcttgttttttgtatagttttttctttttcggggagaatgcgcttgtccggcatttgcatctcatgttataatattaagaaacgagagttcttattgtcacagtacgatcgaggtgatgtatatgaaacgaatacccacgacagatttaaagcccggaatgttcacagccagaccggttcgcactgccgcggggcagatcatcctggatgagggctgtcttttgagtgcgcagaccatcctgcacatccgtgactattccataccggaagtatggatcagggacagcagcgattcctccggcgggcttcacgattatctgcaaaagcagtacgctccggttcgttcccgttccgagcgtatccggcaaagcgaagaatacaagattttcagtcagaagtttgacagctgcactacgatgcttcacactgcgttaaacgactgtattttacgtgccaaaaagctggagacagacaagcttcttgcagggaccctggatttgtttgcgtcgcatactaccacactttccatgttcgacatgctccataacttacggcaaatcgacgattcgacttacgcacacagcgtcaacgtcgccattatctcccgcatgctcgggaactggctcggtttttcggaggatgcccagaacacactgactctctgcggtcttttacacgatatcgggaaatcccggattcctgccagcatcatcggcaagccgggcaggctgacttccgaagagtttgaacagatcaagcgccatccccttttagggtacgagctgcttaaaaaccagcctctcgatccgcacataaagaacgctgccctgatgcatcacgagcggtgtgacggaagcggttatccgttcggtctgtacgcatcggacattgacgactacgcttcgatcatagccgtcgcggatgtatatgatgccatgaccgccgaccgctgttatcgtctggggctgtgtccgtttgaagtgatcgcccagtttgaacaggaaggcttgcagcgctacaagccgcgctatattctcacctttctcgaacacattgcgcacacttacctgcacaaccgggttctgttgaacaacggacagaccggagagattatttttatcaataagcgtctgacgagacctacgatccagatcgccccctcacgtttcatcaatcttgaggagcatccggagctctacattcaggcgattatttaataacatccaataaaggagatatcatgatggcagacaaccataacaccaacgaagacgaggatatcctggtcaccctggatctggatgacggcagccaggtagaatgtgagattttaaccatttttaccgtcaacgagcaggactatatcgcccttcttccgctcaccgaagccggcgagccgaacgaggacggcgaggtctatatctaccgctatgcggaggatagcgatggcaatccgtctctggataatattttagacgacgccgaatacgaagccgtatccgaccgctttgatgagtggcttgacgaggcagaatttaacgacatggaggactgagacgctctcctgcctcggcaataaagcgcgagatatctgcatctttctgattcatctgtttgacggaaaagagatgcagatatttttttgcccgcgtcataccgacgtaaaacatccggcgctcctcctcgatgtcctgatccagcaccgccttcttgtagggcatcactccctcgttcacgtcgatcagatagacgttttcgtactcaagccccttggcggaatgcagcgtggaaagcgctacgctctcactctgcttttcctggctctggtacaggcgttccaattccctggtgtaattctcgatgtgcgcaaaccatccgtcataatcttcatagcctcttgcactttcctgtagttcatccagcacatcataaagttcatccgcccggatacgcctgtaatctgcatactcggcacagaactcgtcatatccgatgcctttccggatatagttgatggcggcaaacggattcatccggcgaagctgcatcacatcatgctccagcgtgacgatccgctccgccacccacggctgttccgcctctctgaaataccattcccacacatcgaatgccaccgtgtcctcgtccaatgaatctctgctgatatagcgcttcgggcggttcatgatctgcagaaaatcacggcgttcccggcttccctgcgcgatccggatataggcaaaaatatcctttgcgatccagtgctcgtaaaggttcggtatgcggtctctcgtcctaaacggaatattgtactccatcatctgctccatcagaagacgcggctgtgtgttagtgcggaacagcacagcaaaatcacggtagctctttcccctctccaccgcatcacaaatatcgcggatgatccgcagattctccttccgctgatcctcaaaaacggcatactccaccccggtctccgccgggagtgccgcgcggatgcgcttctggaagcgctccttattgtgcccgatcagattcagcgcatcctcgacaatattggcctgcgaccggtaattcgtgtcgagaagcacggttttcgtccccggaatttcacgctcaaaccgcagcataatctccggctttgctccgcggaagcggtagatcgactggtcgtcatcccccacaacaaacagatttctctgctcacccgcaagcagcctgaccacctcaaactgaatctggttgatgtcctggaactcgtcaatcagaatgtagggatattttttctgccaggcagccagaatatccttccgctccttgaaaagctcccatgtatacaaaagcatatcctcgaagtcaatcagatgatgcgcatagagatattcgtggtactcgctgtaaactctccggaacacctcttccccgcagttcgtggaatagtaatgatcgagtgaaattccgctgtttttcactagaccgatctcccccagaagcgctgcgatgaactccgactcatcctcatattccagcctgtggcgcttaatgatctcacgcatgcagctcacccgctgctcctcgcggatgatgttctccgcctgatagtggtaggcgtgctttaagatcataaaaaagacggcgtggaaagttccaaacgtcactgcggaagattttccgcccatcaggcgcaaaaaacgttccttcatctccgttgccgccgctcttgtaaacgtgatgacaagaatgtttgccggattgattccatattctgttatcaaatgtctggtgcgttccgtaatgacaagggtcttgcccgaaccgggcccggccagtacgagcatgggaccatccttgtgacggatggcctcacgctgagacgggttaaaactcatagattacctctgattatttctgtaacatggaaatgccttttttgattctcgcaatggattcctctttgcctaaaacctccatcagctctgtcgctccgcccggcgtcatctgtttgccggacactgcggtacggatcggccacatcacatagccgttcttcacgcccttttcctcaacatacttaaggagcgtcgcatagagtgcatcattggaaaaatcctcctgcgcttccagcagcggcaggacgtcgcttaaaacctccagcgaggtctctgcattggtcttcatcttcttgtgtgtgtacatcgctatatcgtactccggcagttcctcgaagaagtcgatgtggtcgcggatctccgggaaaacctcgatacgggtcttcaccatcgctgcaatcttcttcaaatccatatccttgtgaatgacctcgcgcagatacggctccgccatctcataaaaacggtcaaaatccatcgccttgatgtactccccgttcatccactttaacttggtgtaatcgaacaccgccggggatttgctgattctgtggtaatcgaactctttgatcagctcatccagggtaaagatctcgcggttgtcctccgggctccatcccaaaagtgcgatgtagttgaccactgcctcggacaggaatccctgctctaagagatcctcaaaggaagaatgtccgctgcgcttggaaagctttttatggttctcgtccgtaattaacggcagatgaatgtacaccggtgactcccagccgaacgcatcataaagacgctgatacttcggtgctgaggagaggtattcgtttccacgaaccacatgcgtaatgttcatcgtgtggtcatcaacaacatttgcaaagttgtaagtcgggtatccgtccgacttgattaaaatcatatcgtccagttctgcgttctccacggtgatatctccgtaaagttcgtcgtggaaggttgtcgttccctcattcggaatattctgacggatgacaaacggcttgccggcagcaagatttgcctcaatctcctccttgctaaggtgcaggcagtgcttgtcgtagagcgtgatctccttgccctcgaccacctctgtcttaagggatgccagacgctccttgtcacagaagcagtaatatgcctcccccttctcaatcagctctttagcatatttcatgtaaatgccggtcttcatacgctcgctctgtacataaggaccgtatccgccgtccttgtccggtccctcatcgtgtacaagtcccgtctcctgcagcgtgcggtagataatctccacagcgccctccacatagcgctcctgatcggtatcctcaatgcgaagcatgaaatctcctccggcatgctttgcaattaaaaactcatataatgcggatcgcagattgccgacatgcattcttcctgtcgggcttggtgcgaatctggttctgactttactcatcttaaacctccattgtataacaccttacggtgctgtttctttcctgaataacaacagcctgtggctgtcctttgtcttgtgacatgaccacaggctattatataacaatttgatacttctggcaagcggacaaatcctgtgcctataattttttgaagacctctgtctcgcgcttcaaatctgccgcgatgtgctggttctcgtccatatggcgcgtgatgtcctccatgtcgcccacgagcacctgcgtgctgtcggcagcgctggaaacgcccttcacaccctcctcgatcgcatgtgcaatcgtgttgatggaatccgcgatctctgccatcgtcttctttaagacctccgtcttctcggtaaagtctcccatgctggtctcaatgtgggttgccttctcccggtacgcacttccggcatcgacaaacgcctcaaactccggaagaatggaatcattcatatactgcaccagtccgttggaatgttccgtgaggtttccaaccgcctccgtcacaacgcggttgatctgctggatatggttggctgcctcctggctggcggctgcaagctggctgatctccgtcgcaacaacggaaaatcctctgcccgcttcccctgctctcgctgcctcgatggaggcatttaacgccagaaggttggtctggcttgcaatatttaaaatatcatcggtcaggctgtttacctgatttacgctcttgctgtcctcgattgcctgatttaatacggttaaaatctcattgaccttggctccggtagactccatgttctcccttgcggaagcctccatggaatccgcatgttccttcatctcgcgggtgtacgcgttgatctctgacgtgcgctccgcgatctggtcaacctcctgctttacagactcggtgttcgtattgatgagggatgcattggctgacatttcctccatcgtggcagaaagttcttctgtgagtgccgacagatccgacacactgccattcgatgtcacgacgctgtcgcgcacctcgccgaccacagattccattctggttgaattgttcacgatcaccttgaaaatatcctgaagcttgtccataaacacattaatgccattgccgaccgctgcgacctcctggttcgcgtgcacgctcacacgtctcgtcagatcgccctcgcgcttgtcaatgtcctcaataatattggtgatctccttctgtgtctttaacagagggataattaccagccggaatacgcagatcagagttgcaagcagcgccgccacactgatgatgatggatgccgtgctcgccgcgattgaagtacggtagaccgctgcaagctgttccttcgccacatccgcattttcgctgacattggtgcggattgccgcaatgctctcctgcattgcactggaataatcggcgatcttgccgtttgccagcgcataagccgcctcgttatcgttgttggcactgtatgccatgaggttggcaagctcgtacttcattccctcgtagttggacaccagcgcgtcgtattccgccttgttgtcgtctgtcacatattcctggaaatcatccagatatgtctctaaggtctcctgctcactccggatggtctcgaccagcgagatcatggtatttaagtcggtcgccacgatatgggacagtcccagtctgtggatcagaagcgtctctttctgaatatcgccgagctctgaaatacagctcatgtagccgtttgcaatctgcgttgcatttgcatttactctcttaatattggtcactgccagaatattggaaacgactgacacaaatcccaggataaataccggaatcagaataataaactttgtactgatatagctttttttcttcatatcctgctcctccccgttactgtaccgtcgactgtgtaattccagccacaagcgtatccatcacttcctgcggatccgttccgtttgtgctgcctgtcgccatcagattgccgaactccgtcgtcgcatcccagaagctgttgcccacacgctggagtttgccgtactgcgcctgcgcaatgactgcctggatggcaggcaccgcctgtacctgctccgacgcagccgcgtttttattggaaggtccctgatcgcgctcctcaagacgcagcatctggttctcctcgtttgtaaaccagtctgcaagctttaatgcccagtccttgtgcttggaataggcgttgacgcccatcatcttatagcccgtgaaagaggccatctggatctgctgtcccgcgcaggtgtaggtcggaagcttcactgccccgtaatcgttgccccatacctttttgatctccgatgcattccacacgccgctgacgcctgccacaaccgttccgtcctgcacgccctccatgaattccgtgtcggtacagcttaaaaacgccggattctgtgcgatggcaagcagcgcctcctcaatgtcgattccctttatgctgccttccgtcgcattccagtcgcagtagttcgtcaccccgtcgtcatttacaccgaaatccagtccggtgttgccaaaaaacgcatagaggtaccagccggaactccagtccatcgtcaccttcttgcccacagcgcccgctgctgccagaagcccgtccatcgtctggacgtcctcttccgttaggtaattcttgtcgtaatacagaaaatatccgttgtccgccgtcatcgggtaagcgtacagcgtatcattcacagaagccgctgcaaccgcctcatccagattcgcctcccggatctcatctgcatttggtaccggctctaaggcaccggctgcaaccatgctggtaagctgatcgtccggcagcgggaatacatccgctccgttatgtacatctccaagcagcgtcttgcgcgtctcagcatctgcattctccgcaagctggatgtcaaactcttcctgtcctgcatatttctgctcgaagctgtcgatcatctcctgcagaacatcaaaattggcctcctctgcccatacggtcaatgtaaccttgccgtcatcctccgctgcatcgccggacaactctgtcgaatccatgaccgcctccgtctgcaatacggacggttcaccgtttacggactctccacctgccgtcgtatctgcacctgtacagcccgacattgctgttgtaacaaatgttgctgctgcaaccgccgcaataacatgcttcttcatctgaaatccccttcctttgtattcgtatctgtatgtgcaaattccctctgccgcctcttctgttcttatacacaattttgcactcattttatatattttacacctattttacaaaatgcgcaatcggttgttccttttttttaatttttcttatcctttctcccacttttacatccgctgcaggatgagcagtgaccacagcagccacaatcttctttgtcgttttttctttttcccatatacaaaagcgccaggatgatccacaaaaggatacaccccagcacaatcagatccaacgcatgcaacccactcaaaagaagattcctcctatctgataaaccgcaaatgccatcagccacgcgaccgcgcattgaagcaccacgacgagaaatgcccgcatgccacttcccatctcacgcttcaccgccgcaatggctgcaacacacggcgtgtaaagcagcgtaaacacaaggaagcttgccgccgagcgcccggtaaacatacttccgagcaccctgcttagattggcagtcgccgtgccggtcaacacactcaaggtgctgaccaccgcctcttttgccgtaaatccggtaatcaacgccgtagaaaccctccagtccgaaaaaccgagcggtccaaacagcggtgcgatccactgccccaccagagcgagcagacttttctcactgtctgtcaccacattaagcttcagatcaaaggtctgcaagaaccagatgacaatcgttgccacaaagataatggtaaacgcgcgctccaggaaatcctttgccttatcccagatcagctgtccgacactctttgccgacgggaaacggtaattcggcagttccatgacaaacggaatcggattcccgcggaacgcggtgtggttcagtaccagtgcggacaaaatgcccaccacaattcccgccgtgtagagaagtatcatcacaaccgcctcgttccccgggaaaaatgccgccgcaaacactgcatagatcggtattttggcagaacagctcatataaggcgtgagcataattgtcatctttctatctctctcactcgacaacgtccttgtcgccatgaccgccggaaccgtacagccgaatccgatcagcatcggtacgaagcttcgcccggaaagtccgatcttacgcagcggcttgtccatcacgaaagccacgcgcgccatgtagccggagtcctccagaatcgagaggaagaagaacagcaccacgatgatcggcaggaagcttaacacgctcccgacgccggcaaaaacaccgtcgatgagcaggctgtgtacaaccggattcaatccgtacgcggtaagccccctgtcacagacggcagtaaacgcgtcgattcccaccgccagccagtcgcttaacgccgcgccgaccacatggaacgtcagccagaaaattaaaaacatgatcagtagaaacatcgggatcgcaaggtacttgttcgtgagcacaccgtcgattttcacactccggatgtgctccctgctctcctgacattttttaaccgttttttggcacaccttctctataaaggtataccgcatgtcagctaacgccgcattccgatccaatccacagtctttttccatctccgcaatactatgttccatcatttccagctcattctcagaaagagccagacgttctataatgtccgtgtcattttccacgatcttcgtcgccgcaaagcgcggggacatcccgatatttaccgcatgatcctccacctgatgcgacaccgcatgaatgcagcggtgtaccggcccctgctcgcagaaatccatgactttgggcggtatctttttgcccgcaacttccacaatcgccgcaatcagatcctcaattccctcatccttcgccgcactgatcggaatcacgggaatccctaattcctgcgacatctgcctgtaatcaatggaacctccgtttccgcggacctcatccatcatattgagtgctaacaccatcggaatgtgcatttccagaagctggagcgtcaggtaaagatttctctcgatgttcgtcgcatccacaatgttgatgattccatccggcttctcatttaagataaaatctctggtgacaatctcctcattggtataaggtctgatggaatagattccggggagatctaccacggaacaattcttcgtggagcggatttcccccatcttctgatccaccgtaacgccggggaaattgccgacatgctggttagctcctgtcagctgattaaacaacgtcgtcttaccgcagttctggtttccagccaatgcaaatatcatttttcttcctccggtttcacttcaattttcgctgcgtcctcccgccggatcgtaagctcatacccgcggatgcgtatttcaatcggatctcccatcggagccaccttgcgcacctccacagcagtcttcgggatcagtcccatatctaacagccggcaccgcagtgtgccctctccgccgaccgcagtaatagcagcgcgctttccgattggcagttcctctaatgtcatattttccacacaccttttctcttttgatattgatattcattctcacttatactaatatgatgcttctgcattgtcaaccggcattccggtgtaatggaattttttgtttcagggaacactaaaaggaattgctgcaataagcacagctctctttggggtgataagtaatattataaagaaacgcacttggggatttcatgtggaaatgcagagggaatattcgttggaaaaaaatgtgagcatttctttcagctgaatgtttgcatcagattccgtgtctcttccacgttttgacaatccgccgggtgcatgtccgacacaccagagacaatgggcggactttctggtgtccctaagggcacctcttcacagacaatataaaaccgcgcgaaccgaaactcactgccatctgctattaaaaacatggcagatggcaattcagacatcggcttcgcgcggttatgttttgctcagaggtgcccataagggacacacacaaaagtcctacaaattgtcttccgggatgcggacatgacccgcggagtgctccaaacttggaaagacacggatcatcgaagatgcaaacatccggctggttagaaataccacattttttgaaccgaattttcctctgcattttcatctgaaatcccactgtgtaatcttctgatcatattacttatcaaacccaagtacgatatgcttattgcggcagttccttttattttccgcatcccggatcaaattcgggattacacatataaaagttactgcggtcgagatcgtcctgaatcatccgcaatccctcgccgaagcgctggaagtggacaatctcccgctgacgtaaaaagcggatcgggtcgcagacctccggatccttgaccagacgcagaatattgtcgtaggtcgtgcgcgctttctgctccgccgccatatcttcaaacagatcggtgatcgcatcgcccttagactggaactcgcacgcattgaacggaatgcctcccgccgcctgcggccagatacccgccgtgtgatccacatagtaaggcgcaaaccccgcctcctccagttcctccgcactcagtcctttcgtgagctgacggacgatggaagcaaccatctcaagatgtgccagctcctctgtgccaatatcggtcagcagccccgccaccttccgatccggcatgctgtagcgctgcgacaggtaacgaaacgatgctgccgcttctccgtccgggccgccgtactgcgacaaaatgatctgcgcgatcttcgcattggggcttgtgatgttgaccgggtactgcaggcgtctctcataattccacattagcagccacctccttcccacggcaggggctgttttgcccaatcccagtaagcatctggatttgccgtatcaatcgtcagcggtccgaatttgtccgcatacacctgcatggcatttctgcgcatttctatatgatgattgaagtaacagatcgcttccgcatctatgggatgcgtatccagatactccgcgatgtccaccacagcaaagctcaccatattgatccagtgcagaagctgtgcctgattcatctgtgtcatctgattcatcagcaacgcctgcacccccttcccactgccagaaacggcttatcaagttctgggaatatggttccggtttcaagtgccttatccagttcgtaggtcgttttaaagtgctgccagggaacatatgccatcgcaaccacatattccggctgtctatcagaagctgcatccggttcacacgcacatcggctgcgcgtgtttcctgctgcattgtaatttctcatgcggctctcctattatgatatcttccctttactctatgccgcatcccattcacttgtgctaatctccctcgttaattttatctactgcatttaaaatcttctccatctgggggcgcatgcttccgaccttgtctaaaagctgttctgcctcctctttctgctcgttgacctgcgagagattgttctcaatccgtgcgcgcagcttctgtctgcgcccgatcagtccgtgcttgatctccaccatctccttgggatcgacgagcgcaactgcttgtgttacccacacatgcgcatcatacagttgataattggagagcatgcgcaccagtctgccgttaaaatattccagatcctcattggttctctgatatttctggcgttccttgaccgcctccagataatactgccactggttttccagttctccagcactttttacatggtatttttcacacgcataatcgaccgcattagcaacattgatatatttcagcttgaccttgttaagcagaacaatcgcacggttctggctccgctccgccacctgtatctccgacaggtcattttggattttcatgtaaataccgcacaccaccaccgcagttgcaaagatcagtcccatccacgcatagtagaaatccttttccagaataatctgtaaaattccgaacaccaccgcgagcgtcaccgccagaccgacaataatatacagcacattttttaactttttctgctgatggtccaggtattccttgcgcagattccactcggacttttcccgctccagatacttcatatccctctgcagcgtgtcacggtgcagttcgttggtcttaaaacgtttgattgcctccggcagttcgcgttcctgctgctctaactgtgtaaactgcgcgtccgacaacttcttggaggagttgagaaattccgtgcgcgccttgtttaactgcaccacatttaccgcgatctcagaaatcttatctctttcttccttcggtatcttctccagagtctcaatatcgttcagataggacgtcacaatccggtattcttccttctcatcgtccagctccttggtcaactcaatcatctgctctaggcgctccaccacgtactgttcaatcttaccggtatttttgtaatccttttttgagagaaccgttgtatttaattctcccatcttactctcaaaatcaggttcctttttctttctcttccaaaaaaacatcgtttcacgcttcctctatattctgcaatttttccgataggtatctttccactctgcaagcattcctgcaatttcatcttcctgcccgtcggcaaacagtccgtccacctgctcttcaaactgacggatctcctccgtccgggaaagctcggaaagtctgtgcgccgcctccgccgcctcctctgccgtcatgccgcattccgccgccgtattcttgaatccgtcatcatcgtgcagacaccggtacgcatagagacattcgcggagagattccggattttcattgagtccgtacgccttccggtaacagtccgctgcttcccgaaaccggaataatccagtatacgcttttcccatgttatgccagacattcccgaccaggatcggattctccgctgcctgattcgcaagcagcgttctgtacgccgcgatagctgccgcatagcgcccgtttgtcacatagcggtcagcgcggatcttgctgcactcgtattcggatttgtgttccagctccgcgatctgctgcgcaatctgcgcgatctgcattctgtcacaatacccgctctgcgacagcagacaggtcacaaactcggacagggtgccgccttttctcacaatctcccgaagggcatctgcagcatcttttagtttcagttcccgttccagccagttgcagagatcctcattcataaaatcactgcggagcagatagacattgtggcagatataataacttaattcctccagcgagtaaacgccgattgccgcctcctccacataatatggaaatgccgccatattctgattgcacagaatcaattctcccatcgtcttctcccacacctctacggattctcttccgaaaattccatccggtaatcccacactttatccgaactcttaaataattccccgaatccaagatcccggatctggatccagacctttgtatccgaaaccggttttgccgtgatgcgaagcctcgttgccttgtccgggcgttccggcagatctaaaagctttagcttctccaccttcgcctcccgggttcccggcggctgcagccagaaatcaatctccggcgttcccgcaaggatcacttcgcacattccctgcgtctcgtaccagttgtcccctgcactgatcagcgtatagaactctgcttttcccatattccggacttttaagctgacattgactttcatctcattgtcacccagatatacataatcccagttttcctgctgttcactgcacaaggcggcgtagcaggcccccttggagtacagattcttcccgacaaacgctctcctgccctgacacagaaacgccacggactgtttcatccagtccccgtcaaatccgtctcccgtcaggtacaccgacgagacaatatgtccgcggaagcagtcctttagaatgccaagaaaattctcgtcccggctgtccgcattcatccggcgcacttcctccgccagcgagatcagctgcggcgtcgtgcgtttttccttatataatctgcagcagcggatatcctccctgcggtaatcgaacagatacacgtcgtgcatcgaaagttccggcacctgatggtaggcaaaatagtaaaaacattctttccggtcaagcagctgcagcttttcccggtcaattccaagcttcggcgccatcgaaaggaacagctccgtcgcctcccgcgacagcttttccatacagatgaccagccgttccggctcccatcttctgtcggggccgcatgccagtcgtatcagttttttcagatagagggtcagcagttcctccgccggataggtctccccatccacaaaaaccttctcaccgccgaccgcccgcgagagaagtctgccgttcgcctcctcgccctgtgcaatggcaagccgcactgcctcctcgccgacaaaccactgcccgattcctttcttcttggtaatcagcgccggaatctgatagatttcgctccctgcaatcgcagaaaaggtctccggttctttcttattcaattcatagctgctgatcacagcgtactggtcatccagatcgattcccagataaaaccggtgttccatatgttcccctctctgtgctacaatagccggtatgcctcttccgtcacttttgtcatgccataatagcgcttcatcttcccggcaagcttctctctgtcatcgagcgtacacgccagcagcatctcattcagccatgcgtagcggtctccgctgccctcttccataatatccccgttgcccaggcagccgctcgccccgatctgcccatccgcggtctggctctccaggatataatactgaaccttctccccgaagaacaggataaagtcttttacatagattccgtcatacatttccgtcaattcatccgcaagatattcctgctgtgcctccagccggtaatgaacctcgatctgctgccccggcgcggtgtgatattccagaaagaacttatctgtaagctgatatttgcgcagcagcttttcgtcgaacttccggaaaaatgcaaaatacagattatgccggatgcaggtgtcaagaagctcgtccgcgatctttctgtcacgctccgacaggtgattctccgagagatattttagcagtgcaatccggcagacgcggtttagatcgcccccggtcagataacgctccctgatctggcggaacacatgctccggcacgacggcgtcctccgtgagatacatattggcaaaataagagagatacgccatgcagaccagatctctgccgccccctgcgcaataactttcgtagatctcttccatgtgcggcgtgtaatcggtcgtatagagcatctgtgtcagaatccgctcttccagatcaaacgtgtcgatctgaaattcgcccgcagctttccacaattccgccatctgcttggtcggcccattaaaatacttgcagaggtaaatcagcatgacatcgctgtattttccctgccggaaggtgctctccgcaaatcccagcagaaaatcatcctcctcatagccgtgatccgcgatcgcatagctgcagagggagacgcgccactccgtcttcagataatcgtagccgtcgatctgcaccatctgataggccttctcatagaggtggttctccgtcagaagcgcggccatctgcctgcgcacactcacgtcggaaagtgcctccgtgagctgccccttcatcagatccagttccccctccgaataggaaaaatccctgccgtcttttttctcgtaagaaatcagcgcaagtgcaagtctgacgagataggttctggaaagtctgcctgactgcagcagctgcaatgcataggtcttctcggtatcgctccatgcctccggctccatatgcctgctcatataccagagcagataggcgttctcccccggtgcaagcgagagacactgacccacataccgctccggatacatcagcgcctcatcctggtataccacactcgaacagaaccggttgccgttcgtatcttccagcacaatgctatactgtggcgtatacgccttaaaataggcggttccgttcacaaacgacacgctctgcggcattttcatctcctcatgccagatgatggctcgggcgatctgacggttggtgcagctgattctgtgtgtgaacaaaagcggcgccagactgtgtgccagttcttcatccagtatacccttgggcagcatctcatcgtagatcaccgccagatgatcgttgatgtgccccgcctcgatctgtgccattgcaaactgctccatcgtgcgctgatatttctggtatacctccggctgtttcgttctggctgctatgatattgacaaacaagaccgccttctgcgtataggaaagcgtactgtcatactggaaatacatctgaatcatgcgcggaactccgcccacctcacgcgcatccagcgacatcagatacgcctcatagagtcctgtaagccttatcttctgctcgattccaagctcataccaccggtggtactcggtttcgtaacactgtgtgcggatcagatatgcacagatggcagaaagcatctcctcctccggctccacctgatacgccgcctctaagatctcgtacagtacccgcgacttctcacgcacctccggcagcagatgcctgatctgctgtgcaagttcctttgtgaggactccctggcgcatcgcccaccgcaggactttcaattcatacgttcccagtctggttaaaagatagggatcctgccagatcagataatagctttccagatagagatacgggctgctgcatccgccctcgatccatgcttcaatcgccttatactttcttggactgctgtaatagtaggattcccgcaaaaacaaaagaatccagaacaacagcgaactcttcggattcttcttaaaaaggagttcaatctcatccgtcagcttatcgacataggacggttccctctcaatcagtgtgcacagatacagatagtatccccattccggcgtctccctgtccctgcagccgcgcttataatcctccataatccacgaagcttcctgcttctgccggttcacaatcaacgcctgcgctttcatcagcgcatacatctcacactccggttccattgccatcatatgatccaggagctccacggactgattcgcccatgcgccggtcacaatctttttcagccggtaatcaatatatagctgtgcaagccgcatccgtccgcgctgtaattccagatgctcctccgatacggcttttgcgccgtccgtcgtggcgcacacttcaaacgtaagcgtctgctccggcaggacaatcgaaagtcttccaaaattcttcccggcatgcatggcagcttttttcacataatatggcacttccagtgtgcttccgataaaatcctcatccgtcagctgactcttttccggcaaaagaaacggcgcgtccgactcaatcgaaatggagagatagccccactcatcccggtgcagcttcaggctctccctgcggtcgccggcgacctgctcgaatgaggcatgatccgcaagaagcgtaaccgcaaccggctttttctgtctgcacccgcgcagatattcctccaccttctgccatgacgccgtgccgtccgcctccccgtcatagagaagacgctccctgacctcggagggctttagtatatttttaaaatgaccggaataaaacagatgatatgcctcctgggcactgctttttgccagtcccgtaaaatcgttcagattcttaatgcgtcccgcagaggtatccgcatacaatctggatacagacacaacaaaagaaaggttatattctccctggttgcagattagaaaaaaatcccccttgacaatatccccttcgatcagtccattgctatgaaattggtaccggatccgcacctcttccccctcaaactggggtgtcagacattccattctggaatcagaggtatagactactccccgaaacggcacatggttcgtacttgtgataatgaaatctccggtgtaatctctaccctccgtcacctcaatgtcgactttatctgcagaaaaagaaagaagcggtctggcgtattggaactttccccttgctagctgttgtatccgtttacgcaaattgacacctgcttttctattgcttttttgaacgcaatgactataatagattataaactaatttggaggagtaatcaatgataaaacacaaggaccattttcatggaagtgatctcgagaaaatagaagaaatctacggcattaaaaaggaagaaattgtcagtttttccgccaatgtcaatccgttaggagtatctccgctgttaaaacacacgctgtccgatcagatcgacgccattaccagctatccggacagggagtacacttctctgcgcagatgcatcgctgcatactgcggaaccgagactgagaatgtcattgtcggaaacggctccaccgagctgatctccctttttattcaggtcgagcatccgaaaaaggcccttgtcattggtcctacttactctgagtacgaacgtgaaatcgcgctgggcggcggcaccacactctattatccgctgcgggaagccgatgacttcaagctcaatgtcgaggattttctctcgcacttaaatgagagcattgatcttctcgtcatctgcaatcccaacaacccgacttcctcctcgatcccgcgcagcgacatgcgccacatcttagacgtctgcaagcagtacgacatctatgtcatggtagatgagacttacgtggaattcgccgataatatggcagaactcacggcagttccgctgacaaattattataacaacatcgtgattctccgcggcacctccaagttctttgccgctccgggactgcgtctcggatacgccgtcacaggcaaccgcgatctgatcaagtccatcaatacacgcaagaatccgtggacgatcaattctcttgctgtcatcgccggtgagacaatgttcaccgacagcgcctacatcaaagagaccaaatcgttgatctcctccgagcgcgcccgcctgtgtaagctttttaataagaatccggacttcaaagtatacgatccaagtgccaactttgttctggtgcgcatcctgcgcgaagatctcacctcgcaggatctgtttgaccgcgccatccggcagaaaatgatgatccgcgactgttcgacgtttccgttcctggataataaatacatccggctctgctttatgagaccagaggacaacgaccgtctgatccgctgcctcttccatcagaattaaaaaaagcgggatccgtgatattgtgagattacccgagaaccgaaagttccggaatagaacagacggcggcaaattctttgaagcaaaattcatgtatttcttccatgccgcagctggcatcccattccgtgtctcttccacgtttggacactcacggagtgtgtccgacaacccgcagacaatgagcggactttctggtgtccctaatggcacctcttcacagacactataaaaccgcgcgaaccgaaactcgccggcatctgctattgaaaataaggcagatgccgactcagacatcggcttcgcgcggttatgttttgttcagaggtgtccacaagggacacacacaaaagtcctaaaattgtctgccggcttgcggacacagtccgtggagtgttccaaacttggaaagacacggatcatcgaagatggcaagcgcggcatggttagaaataccggattttgcggtcagaattgccgccgtccgttgtatccggaactttcagttatctgttttttgcaatatcacagatcccatttttttatgtaaactgcttcatctcgtcggttctgcctcggatcgttccgatggccccctttacttcctccgcatagttccggttctgctcgcttatctcacgcacctgctcggcgcttgcagtcacttcctctgtcgctgcagacagctgtgagatattctccacaatacggttgttggaatccgacagtcctgtgatctgtcccgcgatctcattgatatctccgataagctgtgacatattttcattcagacgttcaaaagactctgccgcaaccgcaatcttctcattctggctctctgtcgcttccaccgaagactccaccgaagtcataacgtcgcgtgcattttcattcagctcgttgatgatcgtggtaatctcctccgtggacttcttcgtctgctcggcaagctgtctgatctgttcagcaaccacggcaaatccgcgtcctgcctcaccggctctcgcactctcaatggatgcgttgagtgccagcaggttcgtctggttggagatattgaggatcatgcctgcgatctcctcgacctccttgatcttattctgcaggcgtgtcatggactccgtcacttcatgattcgtcgccgcaatctgctcggactggttcttcaattcttccattacctgcagattctcctgaatattctcattggaatccgtcgccacatccaccatctttctggagcgctcgcccgtctcgtcaatagccgactggatactctgtgtcatattattctgctcttcgatattcttcgccgtcgtgttggttgcggaagaaatctcctgcatgctctgcgcaactgtctccgaagtgtgcaccagttcatccacaagactggtactcctctcagactcatcccgcacagtctttgagatgtcaaggattccttccagcatcaccttctgtttctcaccctcggacgctgcagaacccagtgcatgatcgctgaatgtcttggctatgctgcccacccggtacataatgaaaaataacagatacacacataatacccggcacaagctgtccacatcctgcaaaccaatccccttgattacacgaatgacctccaccagtgtaaataacgccgtaaaagcgatacaggtctgtttatatctcttcatatcataatacggaatctgcaatgtcagaatggcaataagtgcaaaatagataaactctgcatctgtctgcattccaatcaacgcaaattctacgccgacaccgatggcaacaaccctctttaatctcacatcagacttattgcgcagataaaacgccagttcaaccaccgcaaataaaataatcagcacaacatttccgaccgccgtaccgaccgcaatgctcttgctcgcaagcttcgccagcagatacaccccaaacagtacccataaaataaccactgcaaaaatataaaatgtattcatatagcggtagcgttcactcttatctttataaatgtaattcctgtctgaacccgatgtctgacccatagtcttactccctcctgtcactctttctctatcgattcaaaatctttttttattatagttcatttctcctattttttctactgtttttcaattattttgactaattttttacacattccttatcctcgcgcaacacaacgcatccgcttcttttccgtaagctgcggcgggttgctccagcgacataattctactccgacgcagtgagatcctgccgaagggctttttcattcataggacgtaatttcctatgaaaaaatccggcggatacttccgccggatctctcatccccactctttttcatatgccgtatacaaaaactccacgcagccgtctacgcggtacagcctgaaattctgtaaaaacaaaagtgccgcctcgtacattttttcatcctgctcgtccgcaaggcttccctcaagcagataactcatgccgttgtggtattcccgtccgtcctgtatcgtgtagtggcgccacagttcttttcgttgcgcacatgcggtctgctcccgcataagcgtctccagaaactgtacgcacggtctttccgcctcgctgtaatgattccggtacagatacacaaaatggtgcggcggttcgattccgggattcttcaagccatactggttgaccggataattgtccttctgctgcacccagccaaacaccccgtgaaatgtcaatccgccaaccgccgcaaactgcgtcctctgctctaattcctccggggaggataccttctctcccagttccgctgcaattcttccggcaaccacaaaaagccgtctgtgcatctgtgcacagcggtaaaaataccaagcgtcatagtacgtcgtgccggaccagttcaagccgcagcgcgccgtcaggcgctttcccgctctctccatggaaaatacactcatccgcgcattggcacgcaggaaaaattcaaggacagtctccgtgatttgcggctccgtcttcctgcctgtgccgcctcccgtgtccttacacttctggcagcacaggccaaacagttctcccacaccgtcctcgtccagctttttttcgtgatagtcccgcaggatggcattggcaatctgatagagaatgttggctttccactttcccaccatgcgcacgatccccatgatatcctcataggattcacaccagagttcctccggatcctccgaatgttcaaaggtgtctcttccggggcggatccagctctcgccgtcgactgccggtctggctttttcgctttccgcctcccgctccttcgcctctttgagcagagactccagaaagagaacgctccacttttttctgccggtcttctccggaatccggtctgctgcgctgaccttttttgtcttcacccgctctgcttccattcctaacctttcgcattgtagcggctgccggtctgccgcgtctgattactgtccgacgcatagcggctgtaattgccgctggtcgtataagaagttgccaaaagcgctgccgcctgttttctgcagttgctcttcacacccgaagccagcacctgcacgcggttcgacagcgtgctcttatccccgaaaatcttctgcaccgcctccggttttaccgtctgaaacaccgtcttatctaacaacagcgtgccgtctctctgcagcgtgattccgatctgttttaaggcggtctcccgcgcggagatctccgttttcagcttctttgcatacgtctcgtccacactgtccgacaagtcaccaatcttgcggatcatcatattgtaatcggatacaaaactttccatttccttcgtaagctgctttccggtgtcctctccctcctggtaaagggatttttctccctcctccagaaaacgcttcatatgcgtctccacacgctccgccgccagtcccgtgatctcataatcgtagctttttttctgattctccacgattttgtcgccggatacggctgtcccgttttgaaactgatttaaaaactgcatccacgcagatgtcctgtagtttttactctttggcgcgctctgcgtcgttcctttggatgatgcgcgtgtctttgtgctgctggaaaacgcacgcatctttgccagccggttgttcctcgcacccagaatggcagactggtctctgttataaattctcatactcattttccccgtttcttttctgtatccctatcgttcgttaagatacgtctcataagccgacgcaaaatcattaaacttctgtttcgccatcagaatggattccccgttcttcagcaggatcgttcccacctcaaaactttttaccgcggcaaaattcaccagatacccgcgatggcagcggaaaaacccgttgcctaaaatttcttccacctccttcattctggcataatatgcaatgattcccgtgtttgtgtgaagcaccaccttacgccccacactctctgcatagagaatggttttctgatccacacagcaataggttccgtctgttttaatcagcagcgggcgcttcctttctgcccctgcttttctctgtttcagttctcccgcattgtcaaacgcttttctgcggaaccatactggaatctttttctggcactcctctatgccactatccgaaaggaaaagaacatccggcattgtgccgcttccctcaatttcatctccgcaaagaatctgtacatcctctcttacatattcgccttccatctcttttaaatacttacgcacggatgcctcattcccgcacgccgcaatgtataacactcatattcctccccgctttcgcatccatgctctgttttctactttatatatcggtcatatttttcattcttttatttttcgtaacgaaatacgctgtttttgtcatcaaaaaacagttgacacgcttactgtattattgtattatcttattagtacagatgatttagtagaaaggagatgacactatggcatggacccttgattctgatcgtcccatctttttacagattgtggaacgaatccagacggacatcgtttccggccgctaccagccgggagataagcttccgtctgtacgtgatctcgcagcggaagcatccgtcaacccgaacaccatgcaaaaggcctttgcagaacttgaacgcaccggtctggtctattccaggcggaccagcggacgttttatcacggaggattgtcatatgatagaacagttaaaaacctctctcgctaccgagaaaatggaagaatttttagcacagatgcggcagctcggctttcagaatgatgaaatcctgtcgctcatgaatcagacgatgaaaggggaaaaacaatgagtaccttgttggaatgtaaagatctgaccaaatgttacggcaaaaaaaccgccatcgaccatatcaacctcgccattgagagcggacatatcatcggtctgctcggaccgaacggaagcggcaaaaccactctgatcaagatgatcaacggtctgcttgcccccacctccggttccatcttcatgcagcagaatccgatcggcgcagagagtaagaagcatatctcctacctgccggatcacacttatctgaatatgaacgagcgggttcgcgatattatccggtatttttccgatttctatgaagattttgatgagaagcgtgcctacgacatgttgggaaaacttcagattgacgcctcggatcgtttgaagaccatgtccaagggaaccaaagaaaaagtgcagctgattctcgtaatgagccgtcatgcggatctgtatattttagatgagccgatcgcaggcgtcgatccggcagcacgcgattttattttaaatatcattctgtcgaattacgaaccggaagcttccattttgatctcgacgcatctgatcgccgacatcgagaatattctggatgaagtcatcttcatcgatcacggtcagatccggctcaccgcatccgtggatgatatccgtatgaacaacggtaagtccgtcgatgcacttttcagggaggtatacagatgttaaaaaaattatttaaatatgaatttaagagcacggcaaagatcatgttgatcctgtacgccattctgatcatcaccacatccgtaggttccgtggtgctgtattccttagatctggatcaggcgggtgaaagcaaactggcatccattctatccgtctccgcgattgtcctttatatccttgccatttttgctgtccttatcgtgatgtacgtgtacctgtgtgtccacttctaccgcacgatgtattccgctcagggatatctgacacacacgctcccggtaaaaacacttgctccctttcacgtaaaactgataacctccttcgtgtggatgtttctctccatggctctgatgactgcctccatcgtggcgcttatcgccagcgcctcccacggaaccgcatggcaggattttacttccgcctgggaggagttattcggtcaggacgtattttccttccatttcatcttccagatggtattgggcgtaatctgctcctgcttaacctacctgctctgggtgtttgcaagcgcttcgatcggacagcttttctccagcaataaagtggctgcctccctcgttgcgggcatcgtcctctattttatgcagcagattttctccatgatcctcatgtttggaaccggtatgttccagtcgggagataattccgtgaatttctttgccgttaccacaacgatcgacaatacgaccacatcgacggcaagtatcctgccgagttcactgtttgtcaccagcaacatttactcgatcatcgtcattgtcattttgtaccttgtgtgcgcgagaatcatcacaaagcatctgaatctcgaataaagttctatcagggactgtctcatgaagcagacagtcccttttgacgcagcaagtaatagcaggcaaagatcatgcatttccagctgaaatcgataggatgtctctcttatcctattactcaccacgccaaaaggggccgccacgctcatgtgacagccccttcccgaatctattacgtatttattttgtgctcaagtatgcgtcaattcccttcgcagccgcttttcctgcacccattgccaggatgaccgttgcagctcctgtcacggcatctccaccggcaaacacaccactcttggatgtagcaccgttttcttcctctgccacgatacactttctgcggttcgtctcaagtccctttgtcgtggaagaaatcagcgggttcggagaagttccgagcgacatgatgaccgtgtccgcctcaatctcatactcagaccccggaatctccaccggacttcttctgccggaggcatccggctcgccaagttccatcttgatgactctcgcgccttttacacagccgttctcatccactaaaagctccgtcggattctgtaacaggtcaaaaataatgccctcctcctttgcatgatgcacctcttccttacgcgccggaagttcttcctcaccgcgccggtacacgacatgtacttccgcaccaagacgcttagctgttctcgcagcgtccattgccacgttaccgccgccgacaacgatcactttctttcccgccttgatcggagtatcgtactcctctaaaaatgccttcatgaggttgtttctcgtcaaaaattcatttgccgaaaatacgcccattgcctgctcgcccggaatgcccataaaacgcggaagacccgcgccggaaccgataaataccgcctcaaatccctcgttctccatcagctcatcgatcgtgacggatttgccgatgacaacgttcgtctcaatcttcacgccgagcgccttgacattctccacttccgctgcaacgaccttctgcttcggcagacggaattccggaataccatagacaagcacgccgcccgcctcatgcagcgcttcaaaaatggtcacgtcatagcccaattttgccagatcaccggcacaggtaagtcctgcaggaccggaaccgatgacagccaccttatgaccgttcaacttctctgccttcttcggcttgatgccatgctctctcgcccagtctgctacaaaacgctccagcttgccgatcgcaaccgcctcgcccttgatgccgcggatacactttccttcacactggttctcctgcggacatacacgtccgcatactgccggaagtgcggatgactcactgataatgtggtaagcctcctcaaaattgccctcttttacctgcgcgataaacgccggaatattgatggataccggacagcccttcatgcactgtgcatttttgcagtttaagcagcgcgttgcctccgccattgcctcctcggcattatatcccaaacatacctcctcaaagttcgctgctcgcacctgtgggtcctgctcacgaaccggtactcttgtcattacgtccataggaacctccatactctgtattttctatccggcagacgcactcattctctctgcctccgccttctaacgatcacatctgccttctcagccgcactgtccgcagccgccgtgatgggtatctccctccgtcagctttaacatcgctctgccctcttctgtcttatattgctgctggcgcttcatcgcctggtcgaaatccaccagatgtccgtcgaattccggtccgtccacgcaggcgaacttcacttcgtcgccgacaaccagacggcatgcgccgcacattccggtaccgtccaccatgatcgggttcatggaaaccaccgtcggaattcccagttcctttgtcagcttacagacaaacttcatcataatcatcgggccgattgccacacaatgatcatagcgcacgccctgatcccagagttcctgcagctgcgccgtgccggttccgtgaaagccgtaagagccatcatccgtcgtcacatagagattcgctgccactgcccgcatctcatcctcaagaatcagaagatccttattgcgggatcccataatcacatcacagtccacaccatgctcatgcagccactttacctgcggatacaccggtgcggtaccgacgccgcccgcgatgaacacaatctttttcttcttcagttcctcgatatcctcatctatcagatcagaaggacatccaagcggtcccacgaaatctgcgaacgcatccccctgctccaaggataccatgcgctgtgtggaagctcccaccgtctgaaatacgatcgtgatcgtaccggcttccctgttataatcacagattgtgagcggaatacgctccccctgctcatcaatcttgacaatgacaaactgtcccggttcgcaatactgtgcaacacgcggtgccttgacatccatcagatagatcttgtctgccagcttttcttttttaacaatcggatacataatttcctcctcgccctttgtactatcttaatataataaaggaaaagcccctacatttcaacggcttttcccatattttctgtttatatctgctattccgacttcgtttcggactgtatgtgacgttttttctccctgcgccctactcctgtgtctccactttggaaaataggatacggtcgttatcgagcgcctttcccgcgcggagcgcaaactgctccaacaagtcatccaccgacatcgccgcacgttcctctcccgcaacgtccaacacaatgtttcccgcgttcatcatcaatgtccggttgccgagcgtcagcgcctggtgcatgttgtgcgtcaccatcagacaggtgatctgccgctctgccacaatctgtctggtcagatgtagcaccttctctgccgtcgccggatcgagtgctgccgtgtgctcatccagaagaagaattttcggcgtgaccatcgtcgccatgagaagtgtgagtgcctgccgctgaccgccggagagaagtcccaccggctgcttcatacggtcttccagtcccatgtcaagcagcgcaagctgctctctgaacttcttcttatccgccgcgttgatcctgctgaaatatgcattccgggaggttgtcgtccgaagataggcgagcgccatgttttcctcgatcgtcatgtgcggcgccgtcccctttaacggatcctgaaacagatgaccgatcactttgcttctcacatgctcctgctgataggtaatatcctccccaccgagcatgatcagaccgcggtccgggaaaaaagctccggtaatcgcattgaacagggtggattttcccgcgccattgctgccgacgatcgttgcaaaatctccggcgccaagcgtcagattgacgccgtttagggcacacttttcattgacggtgccgggattaaaggtcttgctgacatttttcataatcagcatggattctctttctgctgccatatcacgcatttcctccttttcccttccgttcttctcgcagtaattccgcaatatactgctcattctccgcttttgccgcccgtttctgccggtagaacaccgcctgcttcttcaggtaagggaaagcgatcgccaccgccacaataatggaggataccagctttaagcactctgccgggacattcaggcgaagcgccaccgccacgataaaacggtatagacagcttcccagaatcacgccgatgacccgctttaacatgctgccctttccgatgatcgtctctccgataatcagactggcgagcgcgatcgtcaccatgccggttccaaggttaatatcacaggacttctggtactgcgcgagcagtccgccggagagtcccgtcagcgcattggcgacgcacagaccgatcgtaatcatcattcccgtattgatgctggatgcccgcaccatatccggattatccccggttgcccggatggaaagtccgagtctcgtatttaaaaacagagagatcaatacgccgaccagtgcgacaatcactgccgccacgatcagcttataccaggttccgccgatcgcgtcttttgcccatgtaaatacggaatcacaggcaaacagattcaggttggaggcgaatcccatcaccgcaatattgatcgtgtaaagtccggtgttgacaataattcctgccagaatcgactgtatgccgagtctggtctgcaaaaatgccgtcacaaaaccggaacacacaccggcagccatcgccgccaaaagcccgagtaccggatgtcccgccagtgtgactgaagcgcacactgcacatcccaacgtaaagcatccgtccgttgacagatccgctatatttaaaatactaaacgaaatgaacagtgcaagcgcaaccagtgcataaataaatcccagttccagtgcactctgcacgatcgataaggtgatgattgatcccatattattcaaactcctctgccgttactgtctcaataacttccgaacacatatctttaaacatggagtagtccagtccaagtgcttctgccgtctctgtatttacggtcacaattccccgctccaaggtctcgatcggagttgccgccggatcggctccgtttaccagaatatcgactgccatatcggctgtctttgttccaagctcctcataattgactccgtaaccgcagaatgctccgtttaatgcgaaggagtccgctcctgtgtagtgcgggattcccgcatcgatgaacttctcaaagatggcaagctctgccgtcatgacggtgttgtcctgcggggtaaacactgcgtctacgccctctgccaccagggcatccgctgccgcctgcacctccgcagaggtcgtaccggtcttctccacataggcgattcccttctcatcgcagtatgcctttgcgtcctcaatcgcaccaagggaggaagcctggctcttatcatagagcagtccgacctttgcggtatctggatttgccgccagcatcagatcaaaaatcgctgccgtgtcgatggcatccgacgttcctgtaatattggaacccggtgcgttcacatctgccgccagtccggcgcccaccggatccgacaccgcggaaaatacaaccggaatctgattctcctcggtcgcactctgcatcacgactgcggtcggcgtcgcaatcgggataatcagatccacatcatccgccaccagatccgctgcaatctgtgtcagaatcgactgatctgcctgcccgttgaacgtgtaatccgcataatcaaaggtaactccgagctctgctccttttgctgtgagttccgcttcaatcgctttttcaatctgatttaaggaagcatcatccacatactgtacaataccgactttatatacggttccctccgccgctgtctggtctgcctctgccttctgtatctccgcctgcgcgtctcctcctgcctcattggtcaattccacggtcgtaccggagccggaactgcttccgcagcctgccaccgctgttgccaccatcgtcattgcaagaactgctgtcatcattttctttttcataatcatttcctcctttttcctattacataaaaaaagccgtctcaagctattgcttgagacggtaataaactaatattatcgcggtaccactcatcttgacaaaatgtccactcacttcatgcactatcatacatgccggatggataacgggtccggttcccggcggctcctacctgcgtatccactgttcaggccgccctcaaaagtccattcaacaaatccctccatactgcaatcccaccgcctgcagctctctgtgatctcggataaatgtctactactctttctcaaaggtttatcggtatgtcatttactttaatacattaacgtgtatttgtcaaccttatttttaaatttccatcagacggaacttctcgatcgtctgctccaaatcctgcgcgatattctgaagtgtctttgtgtagtccgtgatgtctgccatcgtcgtgttgacctgatctgtggatgcattgacctcttccgtcgccgctgccgactgctccgatacggatgcaatcgcctccatacgacttacgaccgtatccttgttggatgacatgtccgcattgagccggttgatgttctccatgccggcattcagctgctcaatctgcgtgataatctgacggaatacctcttccgtgcgctcgatcgctttctgctgctccgactgaagctcctcgttctcctgcatggtctcttccacctgcttggacttgtccgtaatctcggtgataatcttcttgatctcatccgttgattcctttgactcatccgccagcttccggatctcgtctgcaacgaccgcaaatcccttgcccatctctccggctctcgccgcctcgatagaagcattcagggaaagcaaattggtctgtgccgtaatatccgcaatcgcatcggaaatatagaaaatcttgtcaatgctggcaatcatctcattcatcactgcaagggacatgctcgacttctctacggtcttctgtgatttttcgatcagatccttcacgctgccgagtccctccgaactgatccggttcgtctcctcggtcatctggttgatctcgctgacacaatctctggaggactccagactgttcttgaggttgtccacctcactgcttgcctcctgcgtgctctccgcctgcttcaccgcaccgtcagccacgctcgagatcgcctccgcgacctgtcccatcgtgcttctggtatctcccgcgatctcggaaatatgatccgaagtctctaaaatatgtctggacttatcctccacctcacggatcactgtggatacatccttgaccatatcgttaaaatgcgtctccagcgcaccgaactcgtctcctctggtgaccgcaatcgtctgggtaaaatctccctctgccacagcagctgtcgcacgctcaatctttttgatctcacgcacaaggctgtacgcggtaataagcgcgatcacaataccgaagatcactccgaacgcacccgcaaataccagcgcaccgttgatcttcgcaagattgccggtgttctcgacatcgctgatgcagcccagaagaatccagcctgtcacctggtctgtcatcgcggtcaccgcacagtccatgccatctgcacgcatcgtgtatacagactccagtgtgatgtcggaagcgctctcatcgcccgcttcctccagggcgctcttctgctcctccagagacttcagttctccggaaatcggcgtccagaattccagacccgtcacatttccgtccgcaaaggtatttttgtcactgtcgatcacaatattgccgtccgcatcgatcagcatggcaaatcccgtgttgagaatgcggatattcctgatataattctccagttgcgccgcatcaatatccatcgccacaacgcccattaagacatctttgtatttgacctcctgcgctacggtgaagatctgcccgcctgtctgcggatcctcataaggctgtgtgatatagctgaaaatagaatttacttttgcctttctgccctggcagttcacataccagtcttccccggacagatccacattttcctcgatggtgttcatcgccgtcttatcaccgttgtcctcgtacttcacccatccggtgatgagttttccgctggacgtcgcataatagcttcgcaccgctccctgcgttaccttgcacgccgccaccagttcatcctgcacgttggcaatatagtcatcaaactgatcctcgtactccagctgcttgatggaagtcttgcgcgtcagcagatccaccggaaggctgatcgtcttctcatacgtctgcagactgttcaacgcgctctctaacgtctgctcgcttgtgagctgcatgttgctgtttaacacattcttcgtacggctgtatgtaatcactccacagatcacaacacttcccgcaatcgccacaagaaagctcaaaatcattttcggccctaaacccaattttttcatctgtttcctccgttcatactgcaatatgacactttattacttacattgtagatgtttcgcacatttttgtaaatatccggtattttctttcattgtattacattctaaacaaaaacctccctgccggcattctgccagcaaggaggttctcaaaaaatgcccacgcactctgctcctatgaaaaataaacaagttcgtcttccggcttttctgcaggtgtaatggaaatcggatacagtaccggtccttttcccttgtactctcttgcaaactccaccttgatctgcgcggtaatatgaatccaggacttgtgcggaatcttatcctcatccggatatttgcacttaaatccgatgaaggtaatatcctccacacagcaggtcatcgcaaaacgtcccggaacaaaaatgcccttcttgagcttgtcaggattgtatacaagcgccagaaagctgactttcttcccctcgtatttcttcgggttgtccaggcagtccatataccagattgcataatccgcatctgtaatctctagttcatctcccgagatgtcaaacggcagctcctcctcgcgctcgtcgagcgatccgtccgcgcgctcatacacaagctgtgccttacggttgagcgccttgacatttctgcggtattttcccttatccgtgctgtcgtcacagcggttaaagatcacgacgtccgcctgaaacagctgttccataatcatcgtgcgcatattggcaagatacatatcaaaggtggtcgcatccacggtcgcaagggactgcaccaccatccacccgcgcggaagctccgtctcggtgagcgtatccattccccaggttccgttatattcgatgaacacctgatccggcagatatttcatattgatggcattgagaaaatcagcagtaaaatcttcctcattctccaccatcacgaggcttgcattgatttttttcaactctgcctcatcatattccacctctccgtcttcacagcagatgatcaggctctttccctgatcggcaaacccgttctccagcagcgtctccttgatcagagtcgtcttgccactgtccatgaatccggtaaataaataaatcggtatctcctgcatgttctattcctctctgtcttatctcactattaaaaggcagtcttcacagcttaagcgattccaaataactcctctaatctgtgctcgtcgatatctgttccgatcacgcacagacgtcccgtataatccggctcgccgtcacgcagctcgtactcccccggcaccatgtcaaaataaatccaggagccgttctcatcctccaccatgcccttcgcacggagaatggttccatagtcgtccgtctcgcacagagtctttaagacatcctcaatctttgccttggtaaacttatgcggcgtctcttttccccagcttgtaaacacctcatccgcatgatgatggtgatgctcatgatcgtgatcgtggcagccgcaggtacagttctcgccgtgctcgtgatgatgctcatggtcatgctcgtcgtggtcgtggtgatgctcatgatcgtgatcctcatggtcatgctcgtcatgatcgtgatgatgctcatgatcgtgatcctcgtggtcatgctcgtcatggtcgtgatgatgctcatgatcatgatcgtcgtggtcatggtgatgctcatggtcatgctcgtcatggtcgtgatgatgctcgtgctcatgctcctcggcttcttccttcgcatgctgctctgccatcagctttctctcaagagaatcctgtccctctaccacctttaaaatctgctctccgcggatggaatcccacggggttgtgatgatggcggccttatcgttgatggactgaatctgctttacgcagagctccagctgctccggcgtcgcattctggctgcggcttaacacaacagtggtcgcatattcgatctggttattgaaaaactcgccgaatgccttcatctgcttgctcgcctttaatgcatttacaaccgtgatgagaccgttcagctttacatcctcttccttctccacgtcaatcacagacttcatgacatccgagagcttgccgacgccggacggctcgatcaggatacgatctggatgatacttgccgatcacctcatgcaggtttctgccgaaatcgccaaccagtgagcaacagatacagccagagttcatctcagtgatctgaattcccgcatcctttaaaaatcctccgtcaatgccgacctccccgaactcgttctcgatcagcaccagcttctcgcctgtgaacacttcatcaatcatcttcttgatgaaagtcgtctttccggcacctaagaatcctgaaataatgtcaatctttgtcatatctatctcttcctttccttacaatacatcatttgttccaaaacacatatattttactcgtttttcctccattttgcaaatcatatgcatttttttcatatattttttataatatttctccggttcactgcttctgaaactgcatgtgatacagtttttcataaattcccttctttgcgaggagttcctcatgcgttccctcttcctcgatgccgttttcggtcagcacaagaatcttctcggcattcttgatcgtggaaaggcggtgtgcaatcacgaatgtggtacggtttttcgccagtttttccagggagtcctgaaccaccttttcactctcattgtcgagtgccgacgtcgcctcgtcaaagatcaggatcggcgggtttttcaaaaagacgcgcgcgattgagaggcgctgcttctgtccgccggaaagcttgatgccccgctgtccgatgtcagtctcatatccctgcggcaatgacataataaattcatgggcattggcatttttcgccgcctcgatgacttcctccctcgtggcatccggtcttccgtaacggatattctcatacacggttccgacaaacagatacacgtcctgctgtaccattccgatgtggtcgcgcagactctttaaggtgaggtcccgcacgtccgttccgtcgaccttcaccgccccctccgtcacatcataaaaccgcggaatcagggagcagagtgtgctttttcccgctccggacgctccgacaagcgccatgtaagagcccgccgggaccgtcagattgatatgttgcaatacctgttcagtattctcctcgtactgaaacgacacatcttcaaaagtaatatctccgcgcacatcggtaagctcttttgcatccgcccgatccttgatgtccggctcgatctccatgatctcgcagaagcgctcgaaaccgctgtacccgttctgaaactgctccgtgaaatcgatcaatgtccgcacgggatcggtaaatacactgatgtagagcacaaatgtgacaagatcactgacattgaccttaccgtttgcaataaggatggttccggcgagaatgacgttgacctgaatcagtgtcgtgaacgcgcccaatcccgcctgaaagcttcccatataatgatagctgttcttcttggcagacaaaaatcccgcatttccaatcttaaactttttcttctcaatctcctcgttggcaaacgactttaccacgcggataccggagaggttatcctcaatctgcccgttgatctccgcaatcttcacacggttctggcggaacgcacgccgcattttgccattcaggtaatacgcgtacgcaaacataaacggcaggacgatgaacgccgccagcgccagaagcgggctgatattgaccagaatcacaaacgcaccgatgatcttgatcgccgagagaataatattctccggtccgtggtgcatcagctccgtgatgtcaaacagatccgtcgtgatccggctcatcagctgcccgaccttctggttatcatagaacgaaaaggataatttctgcagatgctcaaaaatctcggcacgcatgttgtactcgattttcgctcccatcacatggccgtaattcgagataaaaaacttgctgtaacagtctgccgccaccattgcaaacagtgcagccgcaatgattttgatctggaacatgatctgcgccttatcctcgtacacaagcgtgtaggtgacgtagcgtatcactaacggaatcgccagcgcgacggcagcagacaccgttgcaaagaacatatccgcccagaaaatacagcggtatggcttataataagacaacatttttttgaaatttttactcattttcacactccttaatctctttttcaaaagacccttctattttatctgctacgcgaaaaatgtcaagcgacacgccgcacgaactgtgctatactatacatagttacgattaccatttaaggaggcatcattatgaacccaagacaaatgcattatgaaacgcttgccggtaccatcatcaaaaatcttgccagacgccgcatggaaggctactactgcgccaccgtcgaggacgctgaaaagatggcattctctttccttaccccgggctgcacagtatctttcggcggctccatgaccctggaggataccggaatgctgaccgccctgcgccacgatccgggaatcaccctgctcgaccgcgcccaggcaaagacaccggaggagacaaaaaagatctatcacgatgctctttcttccgatttttattttatgagcaccaacgcgatcaccaaagacggcgaacttgtcaatatcgacggcaccggcaaccgtgtggcagccttaatctacggtccggaacacgtgatcgtcatggcaggcatgaataaagtggctgcaaacgtagacgaggcattaagccgtgttcatggtaccgccacaccgatgaactgcaagcgtctcggtaaaaatacgccttgttccgctaccggcgtctgttccgactgcctgtcccctgactgtatctgcaatcaggtcgtcatcacaagacgaagcggcatcgagggacgcatcaaagtcattctgatcggcgaggaacttggatactaaaatccaggtttccacccgacaaggcagaaaaaatcctgcttgccggatttccacgccgcgcatggctgcttgcgacctgaattctattacgaaaaaaagagttaccgcgaaacggtaactctttttgcatacattagttgtactttctttttcttgctgcttcagatttcttcttgcgttttacgcttggcttctcgtagtgttctctcttacgaatctcctgctgaatacctgcctttgcgcagtttcttttaaaacgacgtaaagcgctgtctaaagtctcgttttcttttacaattacactagacattatctcacacctaacctccctccagttgcgtattgtgcatattcaactgtttgggtcatattcattgcactatataagattataacacatatttttttcccgtcaactgtttttctaaaaaagcgaaaaattcagacaatttactcttcccgcagtttgaatttggtaatcagaccatccagggaatctgcctccgccgaaagttcctcactggtagcagatgtctcctcggaagctgcggaattgctttgaataacatccccaatatccttcacgccgtttgcaattctcttaacggactctgcctgctgatcggaagacacacggatatttgccacttcctgaataatatcgtcaagttccgtcaataccttgttcagggattctgccgtctgctgtgtcacggtgttgccacggtcaacctcactctgatttgcctccagaagatgtctggacgtctcagccgcctgcgcactgttctccgcaagcatacggatctgttctgcaacaaccgcaaatcctcttcctgcctctccggctctcgccgcctcgatggatgcgtttaaggaaagcaggttcgtctgggaagcaatgctctcgatctggccgatcacacttacaagctcctgggaggtgccggaaatacgctccatggcctccgtcagttcctgcatcttctgctggctgacattcgcctccatgccgacttcctttgccttgtcatgcaccacatcggtggatttactgttcgcctctacctgctcagatacggttgcgacactctccacaagatcgtcaaccgcacttgcctgctccgttgctcccttcgcaagatcctgagagctgatagctagctgctctgcgccggctgccacctgatcggaagactcgcggatctgcttaaacgtgccgctcacatcggtcaccatgctgatcagatgtgtcatgacattctcaaattcgccgacataagattccttgcaattggatcttaccgcataattgccctgtgcaaactcttccagaatatatccaagatcctcaataatcttgttcaatgtagtgaccgtcactcggaaactgtccgccagctttcccagctcatcatccgagctgtactgcacttctacatccagatttcctttggagatctcttccgctacttttgtcagctccgtcaccggctccaccaccgcatccacgatcttctggctgttcctctggatcagtctcgtatcattgactgccgtaataagaaatacaataagaaccagaatcgtgtaagcgagtgaaaactgcttcggcacataagccgccgcaaaaactgcaatcgctgcaatcacaagcgtcacatacattaccacactgactctccggtaacttccttttaccttatcactcagactaccttgtcccctatctctttcgtccatccctgtcctcctgttttatcagatatgcccatatcccgatacataaaaacggcatattgccgatacctacgtaccattatacaccgtttttactatttgtagcaacaaattataaaatatttttttgaattctaaattttataaatatacgcaatcgtgtatttctgtcgagtttttatgcaagctgtgcctcaagtgccgttttcgcctcggcaatggcatccggaatgcctgccggattcttaccgcctgcctgcgccatgttcggacgtccaccaccgcctccgccgactttacccgcaatgctcttgatgagattgccggcatgtgcgccgtgcgccatcgcatcgtctgtcgccatggcaaccagattgacttttccgtctgatgcagatgcaagaactatcacgccttctcccagctttccctttaactggtcgcccagatctctcagaccgttcatatcgacgccgtccacgctgacagcgaggagcttcacacccttcacttccacaacctgatccatgacatctccaagtgcttccttggctgccttgctctttaaggattcgttctcactctgaagtgcctttaactccgccatcagatgaccgatcttctcgacgagagttgctggtgttgcctttgcagccttggctgcagcctcgagttcttcctcttccttcttataatatgcaaatacattgtctccggtcagagcctcgatacggcgcacgcccgcagccacaccgctctcagagataatcttaaatacaacaatatcgccggtgttcgccacatgagtaccaccacagaactcctttgaaaaatctcccatggacacgactcttaccgtctcaccgtacttttcaccgaagagtgccatcgcgcctgtcttcttcgcttcctcgaccgtcatgacgtcagttctgacatcaatcttctcagcgatcttctcgttgacgattgcttccaccttcttaagttcttccggtgtcatcgctgcaaaatggctgaagtcaaatctggtgcgctcaccgtcctgataggaacctgcctgctctacatgtgtgccgagcacttcgcgcagcgctttctgtaacaggtgggttgcagagtggttcctgcaggtatccctgcgcagctttgcatccacactgagatctgctacatctcccgccttaatcataccgtttgtcatcttgccgatatggccgaccttaccaccacgcagcttgatggtctcttccacctgaaagataccggaggcggtgcggatctcgcccttatctccctgctgaccacccatcgtcgcatagaacggcgtcttctccacgatgatcgtgccgacctctccgtcggaaagcgcctccaccagctctgtctcggtggtgagcactgtgatctttgaagatgctgtaaggctgtcgtagcctgtgaactccgtcgtgatcgaaggatcaatctcatcgtataccgtagcatctgcgcccatgtaattcgttgctttgtgtgcatcatgtgcttttttcttctggatctccatggctttcttaaatccgtcctcgtcaatggaaaatcccttctcctccaggatctcctgcgtcagatcgagcgggaagccatacgtatcatagagcttgaatgcgttctctccggacagcgtcttctctccagctgtctgcatttccttctccatcttctctaagatggcaagaccctgatcgatggtcttggcaaacttctcctcttcctgcgtaagcactttgaaaataaagtccttcttctcctcgagttccggataaccatccttgctctcatcgattaccgtcgctgcaagcttcgccatgaaagtaccaccgatgccaagcattcttccgtgtctcgctgcacggcgtatgatacggcggagcacatagccgcgaccctcatttgacggcatgataccatcggaaatcatgaatgttgcggaacggatgtgatcggtaatcagacggatggacacatcatcgagcgcatccttctggtaagactttccggacagttcacagaccttgtcgcggattgctttcatcgtatcaatgtcgaatacggaatccacatcctgcatgacaaccgcaagacgctcaagtcccataccggtatcgatattcttctgggaaagttcagtataaccacccttgccatcaccctcaaactgggtaaatacgttgttccatacttccataaagcggtcacagtcacagccgaccttgcagtccggcttaccgcagccgtatttttctccgcggtcataatagatctcggagcacggaccgcatggacctgcgccatgctcccagaaattgtcacactctccggtcttggggtcacggtagaatcttgtgatacgctctgccggcacaccgacttccttcgtccagatgtcgaacgcctcgtcatcctccccgtagatcgacggataaagtctgtcctcctccagtccgagcacctttgtcaaaaactcccaggaccatgcaatcgcttcatgcttaaaataatcaccaaaggaaaagttgccgagcatctcaaaaaaggtcagatgtcttgcagtctttcctacattctcaatatcaccggtacggatacacttctggcaggtcgtcactcttcttctcggcgggatctcctgtcctgtaaaatacggctttaacggtgccatacctgcattgattaagagcagactgttgtcattgtgcggcaccagtgaaaaactgttcattttcagatgtcccttgctctcgaaaaattccaggtacatcctgcgcaattcgttttctccgtaaaacttcttcacgacttcttcctccaacatgtttctttctattttaaatctattttgtctcttcgacgtttccggtctcaccggcattcttagcatccttgcggtcgctcaacttctttcccgcaaaaattccaagtcccgccaccacgaccaaaaccacgaaaatcagtacataatgtacaaaccatcccaaaaatgccatagtcaagtcctgcctttccccaattcttcacaccccgtgtgaaatcttctataactaaatcagtatagcgcaaccgttttatgatcgtcaagtaccgcttttttgaaatttctctcattcctcaaggatctcaaaaatctggttttcatgatttatttccacaacccgctccgccatcgcagcgttcgagattctcttccgataatccggaagcgcgctgtaatcctgccacatatgcatcggaaatacgtaatccgcatccgtgtgctccaggaaataattcatgccgtcaaactggtgctccatcagcctcggatctgccggcacaaacgccagatgaatcttcctgccagaaagtctgcggatctggctgcggtaatttgtacgcatggatccgttgatcagatcgccggctccgtcccagtgccagtcattcagatcgccggcatggtaaaatgccgcgccgttcgtctccacgtaaaacgccacaccggcatccgtcgagcgcagagtctcaatattcaagtcatcgaccctgcatttttcatccgcccccacatagtgaatccgcttcgccacctccggcgcaaatccatgttttaccagaaagtgcgggctcatcttacagtcttttgaaaaaataaaccggatcttcggatatttttctgcgagatgcaacacatccatatcaaaatgatcccgatgcttgtggcttgcgaacacgtagacgggcgtatccggctcatactccggcaacacaccgccaaagtgatacccctccacccggtctccatcaaaccagtcaaaaatcagcaccttctcatccacctcgaccagaaaacaactgtgatgaataaaaataacctgcataattctcctcgtttctccgcaatgtcagaagttctgccctgcaaatctaatgatttctatttcatgcggccgatgatcgcattcgcacgctgatagatctctttcggatcaaacccgatctcgaaatgattgtcttcatagagaactttgccgttaatcatcgtcatcttgacattctgcttgctgccgctgtataccagattcttcacgatattgttttccggctgcatgttcggctggttcaggtcaatcatgacaatatccgcctttttgcccaccgccagacggtcacagtcctccagctgcattgcatgcgcaccgccggctgttgccatgtaaaggatctcatctgcacccacgcactcggcatccatctcccgcacctttgccaatgcggaggtaaggaacatctcgcggaacatatccaggcagttgttgctcgccggtccgtccgtaccgatcgccatggcaatgccctcatccacgaaacgcttcgtcgggcagatgccggaagcgagcttcagattggaagccgggttcgtcactgccgtcaggtgacgctttttaaagatctcaaaatccggctcctcaaaccatacgcaatggtatccgccgccgccgtactcatacatgccaagcgaatccgtaagctgtgtcggtgtcatgccccagcgctctttgcactctgccacctcaagctttgtctcggaattgtgcagccaaaccggagatttcaacttctgtgccagcgcagccacgccttccatcagttcttttgaggtggtgtactccgcatggaatccgacgatgaaagaagtcagatcactcatctcgttgacgatatgatagttttcctccatcagctctaccgtgccgccgaaattgttcagtccgctggtctgcactgtacggaatcccgtatctgcggatgcttttgcatcgaccggcgggaagaaatacatatcaaagttggacgtaatgccgctggtcaggtattccatgatgcccagaatgtttaaccagtatacatcgtcctcggtaagctgtccctcgcgcgggaacacctgctgattcagccagtcctgcagtggcagatcatccgcataggaacgtaaaaatgtcatggctgtgtgtgtgtgcgcgttcttaaatcccggcattaacagattgccgcatgcatcaatctcgcgatcccacaccagcacttctccctccttgcacacatccgccgtgtccgtcccgtcaccgatgtagcagatcgtattccccttgacccagagttctccctccgtgatctcaaacttgtgatgatctgcaagggttaagatctttgcattataaaaacgtgtattcatgtcactttctccttcttctgtctgctgttttcactctatgaagtctctctccagcccgaaatcttcaccgcgtctctgcggatattattttccgatgctcttgatcgtctccgtcacaagagccttgaacttcggtgccacacggtctgccgtctcctgtacttcctcatggcagaggggaaccgccgagataccgcatgccagattggaaatgcaggaaatacctacaacgcgcatgcccatatgacgcgctgcgatcgcctcgcatgccgtactcataccaacggcatcggctccgagtgtccggcacatcgccacttccttcggtgtctcaaactgcggaccggaaagctgtaaataagtgccttcctttaaatcaatatccagtcccagcgccgctttttttaccagaagctgtaactccttatcatatacctggctcatatccgggaaacgcacgccaagctcgtccacattcgctccgcgcagcggggaaggaacaaagcttgcaatctgatccttgatcagcataaaatcaccggcgttcatgccaagctggatgccacccgccgcattggtgaggaataaaacctccgcgcccatcagcttcatcagacgcgccggaagcacaacatccgacatgtcatatccttcataataatgaactcttccctgcatgcacaccaccggaacttctccgacatatccgaagataaaacgtcccttatgtcccggaacggtcgataccgggaatccctcgatgtcgtggtaatccagtgtgtctgccacacggatatcatccgcataatcgcccagtccggatcccagcacaagtgccaccttcggggtaaaatcgatctttgccttataactttcatagcatttctgtaacttttcatatactagattcattgtcggttctccttttcctttcgatcacaaaattatttatattatataccatgcgctctgaaattccaatctcattcattaaaaaacggtgccattttctctccgacccacgagatgaccggaccgagtgtgaagcccatcaggatcgtcaccagaccgatcttcgcaccgaacacccacgcaatcacgatcaccgtaaaatcaaataccatgcgcaccacgcggaacggtacctttttctgcgccttcacaatcagaaacggaatagcatcgtagggggcagttcccagttccgtaaccatatacacacctgccgcgacgacgaacaccgccagtgccgggaacagcacgccgatgcgcactgccatggaatcaaacagcccgtccggcaatacttttgaccatacccacgagaaaaaatcaatcgaatagccgacgaggaacatattggcaagcgttccgaatccgatgtactcccgtccccacaatatcacgataataaataaaaggcagttgagcagcgcctgccagttgccgagactcatgccgagtctgcccgaaatagcaagattcatgctcgtgcaggggtctgttccaaaattgaccagcaccagccatgacagagcaaatcccatgacgatcaccgcgagaattaccgagatgagtctccttgcaaaatgtttcttctgatacattccctgaataaagtttttcattattttctctccgttctttccgatatatatcatagtaacacaggaacggcttttctgccagagttcccttttactcctgtgcgcttctctttaaaggcagcattatgattttatggcaattatttcccgctaggaatccgtgacagttttttcggaattcatgacagctttcttggattcacgatatttttcattggacagttatttctcatatcatatttttttcacatgaaaggatttttttatgcagacacttcatctgacagggatcaataaacttcttcatccggagcgcgacaaacgctccgccaccgagcgcatttttgaccatttaagccactcaaacatcggattaaaccgcggcgaagcaacggctgataccggctctgcggcatcggcgctcgacagtttttctgtcacgcagaatatctcggagcttctcagtcccgcctacggcatgagcgaggaagagaaaaaagcctaccttgccaaaatcattgcgaaattaaagagcggcaaaaagcttacatcagaagagatgcgctttctgcaggcggaagatccacagctataccagcaggcggctcgtgtccaggcaatgcgtggctcccttgagtcgggtcttgcgcacagcacttccaaggaggaggcgcaatctgtctatctggacgcgctcacccatatcagcgaggatgatcccatgaaagaatacatcatcgccgcctatgatgatgccatgaaggaattccagaaatccgaccagtaccagtcgctgccagagacaaaagaggatgccgcaaagcagcacaccggttcccgtcattcccatagctgataatttgagttcatgttgcagcaattatctttgtgtgcctgtcttccaagctgccagaacgcaaccgcactggcagctgcaacatttaaagaatcgacgccgtgcgccattggaatgcataccgtatcatcgcatgttgcgatcgtctccggtgccagaccatctccctctgttcccagtacaattgcaagcttgtcctcattcataagcttcggatcatcaatacttaaggaatcctctttcaatgccatcgccaccgtatgaaatcccagttcatgaagctgcttctgccaattcccagaatctgctttctcttccggctccaaatttcgttctatccccgttcccggctctttctcttcttccgaatccggatttctcacagtctccggctttgtctcctctccaagatatgtccacggcacctgaaacaccgtccccatactcacacggattgctctccggtaaagcggattgctgcaccctgtggtcagcagcaccgcatccattccaagcgccgcagcagagcggaaaatagcgcccacgtttgtcggatttaccacattttccaaaactgcaattcgttttgcccccttgcagacactctgcaccgaagggagcggctgccggtacatcgcacagagcattcctctggtcagttgaaaccccgtcagcttcgtgagtacatcaaactccgccgtgtagaccgggatctccccgcaccgcgcaagaatcttctgtccttctccctcaatatgccgtttttccgtcagaattgacaccggcatatagcctgcgtccagcgccctctcgataaccttgggactttccgcaataaacatacccttttccggctcatggcggttaatcaactgattctctgtcagtcttgcatacacatccaattccggtgcatcaaaatctgttatttctatcatctgtgccattttattcctcttccacatctactgatttctgtttgttcgttgtctcacccgatcttgcggtgccattttcgatcgttttatgctttcggctgttttctgatctgtttctctttgcatcctgacttttgaccgagatttggcttcacagtcgatttcctgggacaatttggttttccttgtaatcaattcattttccctttcgttttccgggcttgatctggctttccgtacggattttggtacctgcatctttttcaaacgggtctgtacggcaaaaatatcctctccagacccgtttttccttgtttcccatcatatttaacatgaaaggccataggaaacgggtctcaggagcactttttcttctctgagacccgaatcacagggaaaaacgggtctcacaggcaacttttcccactatagacccgttggtcatatcaaattcaggatctgagtctcataaacatttaattataataccgatctttatcagaagtgtcaatctatccgtttctacacccggaccggtgtctgtcgtacaaatttcccacctctgtttttcctgcccgcattttgaaatgcttttctggcgcttttacgttgtatgaaaattattcttccacacccgaaaaatacaaaacaggcggaaaccctgacgttcatccgcctgcctttcgcctgttctctgccagcttcgctacgctttctgcaacgtccttcgcatgttctctacaggcttcgctgcgctttctgcaacggtttccgcctgttttcctccacctcttgtctctgtcttctttcggctttctgtttctctattgcactcttctttttctgcttccttttttccctgccctacaaaataatgcataccatcccgccgttgttgtcgttcacaattttctgcatagtatcctgcagcttcatctgacactcgtcatccatcatcgagatcttgccgcggatgccgttctccatcagctcaccgatggattttccgaaaatattggtctcccaggctccctcctcgctcttttcgccctctctgatgtaggcgatcagatcattcgcctgctcctcgcttccgacgatcggcgcgatctcggtctcaatattggcacggatcatgtggatcgagggggaggttgcgcggatgcggacgccgaatttatttccgtgcttgatgagcaccggatcttccattttaatatcggagagtccggggcctaccacgccatagcctttcacctgtaccgccgccatcgcgtccgccaccttttcatatgcctcttttcgctgcgacatctccttcaccagcgcgatcagttcatattcgccggcaatcggcacacccgcaagctcgctcatattttcatagtaatacttctcagcgacctccatgcggattttggcgcagccagatgcaagatccacttcctccaatttcatccgcgagacatagtgctccggcgtaaaatcctgtgcataaatatctttcacttttcgcattccaccgaggatcgttctggcgctctgtatgatttccgccttcatcggatgatcgggcgggagcatttccgtccatttcggaatatagaattccatgcgggcgaccgggaactcatataaaatctgctctaatatatgaaagacatcatctttgcgaagctgctcgcaattcaccggcaacaccgccgtctggtacttttcccgaagtccctccgcaatgcggacggtctcctcgctgtagggtctcgtcgaattgagcaccacaacatagggcttgccaatctcctccagttcctgcacggtctgctcttccgcattcacataattttcccgcggcaaatctccgatacttccgtctgttgtcaccacaatgccgatcgtcgcatgatcccttatgactttttccgtaccgatggacgccgcctccacaaacggaatctcatggtcgaaccacggcgtatgaaccatacggttcgtgcttccttccatgtgtcctgtggctccgtccaccataaagccgacacagtcaatcagacggattttaatccgcgtatcatcttcaagcgcgatctctgccgcgtctttcggaataaacttcggttccgtcgtcatgatggtttttccctgtgcagactggggtaattcatcaatcgtgcgctgcctgctatgtacatcttccatatagggaagtaccataagatccataaaccgtttgataaacgttgactttccggtccggaccggtcctacaattccaagatacacctccccgtctgtgcggttttgtatatctttgtataaatcaaactcttttttgctgctgatgtccataaaaataccccttccatacttaataaaatgtatgaagggggatctgtaattattcccgcggaaactaaaatatcatcgcgcgcggatgaccttctggcgcagacaaagccggggatctgtacacttcgcttttctacagcatcacccgcagcattcccggcaaacagcggaattgcagcttcgtgacatcaccacagtattctccatccgcatgcagcaccataggatccttcagccggacctcgcatgtgccgcagtcgtctatgtcaaatccgcggattcccgtatgctttgccgccacgaggaacggcaggcataaaaatgtgcgccacttcggaattccgtgtacactgcagatcgaaagctttccgtccgtggcatccgccttcggcgccatgggaacgccgcctccctctgccttaaagttcatcgccgcgatatagatgatgcggtctaacttccgctccggggtctcgtccagacgcaccgcagcctccgtcgtctgcatggaaaaaagcgactgcaccgtaatgagcagataggtcagtttgcccagatgcagcttatttaaaaatactttcagcttcgatgttagggcttttttgcagactaacgcgtcaagtcccacgccggcactgatggcgaactttctcggcttctcgcagtcatcccatgccacctctcccagatcgatcacggtgcatgcctctctcccccgctgcatgcaggagagcatgcgcgccagattctccaacggcgtgccgctaagctttaaccctctcgccaggtcatttcccgagccggtcggtatcagtccgaaccgcactttttccggatgtgtgatgccgttgatgacctcatttgccgttccgtccccgccaaccactgcaaggcagatatcatcatccgtcttcgcgcagatctcgacagcaagacgtgtggcatgcccctcatgctccgtgacataatgccggtaatggattcctctcttcacaagttctctctgtacctctttccagatctgcgcgcccctgccgcttctggacttctcattcacaataaaataaagcatctgtttctcccaccgtaacatacattctgctgtttccggcatgtgccggacatacaccgctctgttccacgtctgtttttcctatataaacacaatcgaaaacgcccacccggcctctgccagatgagcgtttctcttctgcaatgctcttttttatcgtatcacggatacacggcaattacaactgtttactgctcttttctgtctgcatcttcgcccacccagagacgtccgtacatttccatataattataaagccgtttggcaagcttgacggtaatctgatctgatgttgcacgccactgccagttgccccccagggtggacggcgtgttcatgcgtgcctccgaaccaagaccgatcagatcctgcatcggcaccaccgcaagctccccgaccgaagaccatgcaccacgcatcatgccccagttatagccttcctctttcgtgaggtttaagtattcctttgcaaatttgacgctctccttcggcgcagtcttcatccagccaagcagcgtatcattgtcatgtgttccggtgtacaccacacagtgctccgtgtaggtatgcgggagataattgcttccctctctcgagtcaaacgcaaactgtatgactttcattcccggaaatccggaatccgcaacaagctttaacacggacggtgtcaaaaagcccagatcctccacgataatgtttaatctgccaagcttctgctccagcgtatgaaacagatccatgcccggtcccttgcgccactcaccattctttgccgtcttatcctttgccggaatcgcatagtaggaatcaaatccgcgaaaatggtcaatccggacaatatcgtaaagctttgacattgccgcaatgcgtttcgtccaccaggtgtatccgtttttcttcattacatcccaacggaacaacggattgccccagagctgtccgtcctcggaaaatgcatccggcggacaccctgccacatcaatcggattcaaatcctcatccagatagaactcttccggattcgcccatacgtcagcagaatcccctgcgacgtagatcggaacatccccgatgatctcaatacctttttcattcacataggcttttagctcccaccactgcttgaaaaacagatactgtaacatctgataaaagcggatatccttcgcataggtgcttctcgcctcggcaagtgcctccggttttctcatctttaaatctttttcccaggaaaaccatgcgtttccgccgttggcatcctttaacgccataaacagcgcataatcagaaagccagtctgcctctttttcacagaacgcctcaaaatcgtccggctctgcgcgaaggaaccgctcaaacgcgatctttaacagcttatagcgcgactcgtacatcacgccgtaatccaccttgtctgctttctttccccacgggaaagactcacactccgcctttttcaacagtttttccttacacaggtattccagatctataaaatacggattccctgcaaagctggaaaatgactgatacggcgaatcaccgtaacttgtggggcagatcggaagaatctgccagtatttctgtcctgatttttcaagaaagtctgcaaactttctggcttcttttcccatcgtaccaattccatacggagatggcagggatgatatatgcatcaatactccactacttctcataacctcgtccttacctttcatctatcactcgaatactctccccatttacaaactcaaacggaacaatctcgtgaatcggctctttcttcaactcgatctggccgaataaaatctcgatgctgcggtttgcaagcgtctgatgctgttgcttgatcgtcgccagcttcggattgtaatactctgcaagcgatgtaccgtcaaaaccgatcacggaaacatcctccggcacgcggtaccccagatcacgcagtgcgcggatggccccgatcgccatcacatctgacattgcaaacactgcagtcacatccggaaacttcccgatcaggcgcttcatcgcccggcaggcgcttccaaaagagaatcttgccttctcatagcagtgctccacatcaagaaccgccccatgctccgaaaagctctgctcacatcccaggaaacgctgatgactcgtataagacttgtcaaaatcaccgccgagaataccgattctgcggtgtccagccacaaacagctgatccaccgcacagcgtgccgccgcaatatcgtccgtggcaacgctggaaagattctcaaaatgcatctcattggcacggttcgtcaccaacacacacggcacatccacaccggagaactcccgatgaaaatattccggattaccgccgaggaacaaaagcccaagcggctttctctccctgcaaagaagaattgcctgctctacctcatctgcatcctcgtccagataagacacgaccagcgtatattccgttttctcgatcatgcgctggatttcctccacgacactggcaaaaagcatatttgagatacctttgaccagtacgccgattgccttggaattgttctgttttaaatgcttcgcattgttgttcggcacaaaattaaactttgcgacaacttcctcgatcttttttcttgcatccgggctgacatcattcctattattaagcactctggaaaccgtgctgacggaatagcctgactctctggcaatatcttttattgtaaccataacttttcctgcctgtttttgtcttcttgatttcactggcaattattatatcagcctttgacagctcctgcaacaacaccttctataatatacttctggcaggctgcataaaaaataatgatcggaacaatggcaagcaccagcatcgccatcatggtaccccagtcaaccgctccgtagccgccctttaaatactggatgacaatcgggatggtcttgtattttttcagatccagcaccagataaggcagcagatagtcgttccagatccacattgcctgcagaattgccaccgtgatcgtagtcggcttcataatcgggaataccacctggaaaaaggtctggagcggcgtacacccgtcaatcattgccgcctcctcaatctcaagcggaatgctcttcacaaaaccgcagaacataaacaccgccagtccggctccgaatccgaggtataccagaataataccgatgggattgcttaaatgcatcatgttcgccagctttgacagggagaacataaccatctggaacggcacgatcatggaaaacaggcataacatgtagatcgtggagttcactttgttatgtactctcgtaatgtaccatgcgcacatggaggtacagagaatgattaccgccacagaacctaccgtgatgataacggagttccccatcgccgcaaaaaagttcgtcttctgcacgcccttaataaagttctcaattccgaagaaggaacggtgatccggcagtgcaaacggatatctcgtgatgaatccttttttctttaaggagttcatcgccacgaggaaaatcgggtacagccacagtaccgcaaggattgagaaaaatacggtcaaaatccatccgtgtttggcacgtcttaccgcgctcacctgattgtctgcttttttgttctttgccattattgctgcacctccttacttctggtaagtctgttctgtagcattgcaatgactgccacaatgataaagaataccaccgctttcgcctgaccggcgccctcccatccggttctggtgtagaatgtctcataaatattcagtgccagcatctgggaactgttcgaaggctcgcccgcagtcagcgccaggttctggtcaaacagcttaaaggagttcgtcagtgtcaggaatgtacagatcgtaatcgacggcattaccatcgggatcgtcacatggcgcagcagctgacggttcgtcgccccgtcaatctttgccgcctcgatcagctcacccgggatgttctggatgccggcgatatagataatcatcatataaccgatctgctgccagttcattaaaattacaagtccccagaatccgtaggttccggaataggtaagtgtctttccgaagttcgccagaataccgtttaacaggatctgccagatatatccaagcacaatacctccgatgaggttcggcataaagaacacggtacgaaacaggttcgttcccctaattccctttgttaaaagcatcgcgatcgcaaatgcaaacacattgatcgtaagaacggacacgaccgtaaacagtgccgtaaacaccagcgcatgtgtgaatgttgcatccgaaaaaatccggatataatttttcagtcccacgaactttgcatcagtcaccgtcgtaaattcacaaaacgataaatagatacccataataaaaggaattataaaaccgattgtaaatgccactaaagtcgggagtgcaaaaacaggaaaatatttcttaattgatttctccatactctttcatcctctcatattcaataaaaccgatatcgggcagatgctttgcagtacccgcatccttctaaaaaagggtgggcagttctcatgcccaccccctgcattttacagatttttattcgtgtgttgcgtcgtactcagtcttccatccatctacgaatgctgtcacaacgccatcccagtcgccggtaccctgtgcatactcaagtaatgcagaaccaacgccatctttccatgtctcagaaggaatagtggagaagttccatgttacagaatacttgccagctttggtgtaagctgcatctgcctggatgaatacattgtctgctgtgtaaccgtcagcaaaagtatcaaacggtgttgtgaatcccattacattagccatggaatcacgtccctcatcagatgtgatcacccactcaaggaaatcaagtgttgcctgctgatcctctgcggatgcctgattattaacgcaccagtagttctcagaacctgtgcagagtccctgattttcctcaccgtccacaccaatgtagatcggcatcatgctcatgtcctcagctgttacgagataaccgttatcctcattggtcaggttgctgtactcccatgtaccgttctggtagaaaacagcttcttccataccgaactcggactcagcctcgtcaccggtcttgctggaaagaaaacccggctcacaggtggaatctgtaatgtagagatcccagatctgcttgtagttgtcaaggtatgtaccctcgattgcatcggtggaatcaatgcccttgtccttgtactcatagtagatcggaaggtttgcaaggtgtgtcttaaatctccagtcggaagatccatccatacctgcggaagtaaatgctccctttaagtcatatccgaactggtcgttgatctcgtctaatcttgcctgaatgtcgtctgccactgcctttaatgtctcaaagttgttgatgtcttccggagaagagatcactgcgttgtccattgtgcagtagtcgtttaagatcgtcttgttgtaaatgatgccataagtctcaattacatatgcgataccggaaacctcgccagcgtcattcttcagtgcatagtcatcgctggtcagatgggagtagatctcgctgtttgaaagatccagacagtaatccttccagtttgcaagtcctaccggtccgtttacctggaataaggtaggagcttcggtcttggcgatctctgactttaacgtctgctcgtaagtaccgtctgctgctgtgataaccgttactggaacacctgtctgctctgtgtaggttgctgccagatcctgccatgcctgatcctgctccggcttgaagttcagataataaactgaaccgcccgctgcatccgtcttcgctgcatctgtatctgccgcctctgtggttgttgcagctgcgtcgtttcctgtggtagctgctgcgttactgtctgttgtgctgctgtccccacatccagtaaacatcgttgcgagcattgcacttgcaagcattacggataacacttttcttttcataaatttaccctcctgatatgatttgttcaacttcttctgtaacgtttccggtattgttatcggtaatgtttccggtaacgttttcagttgatggttagattatatttccatatgtcaggaaatgcaatacccaatcgttattttccacattattgccaagtttcaagaatacattttgtgatatttgtacaaaagaaaggctgccgcaataagcatagacctctttgaggtgataagtaatattacaggaatactagagaacaaaaaagttccagaataaacagacggcggcaaattctttgaagcaaaattcgtgtatttcttccgtgccgtggctggcatcccattccgtgtctcttccacgtttggacactcacggagtgtgtccgacaagccacagacaatgggcggactttctggtgtccctaatggcacctcttcacagacaatataaaaccgcgcgaaccgaactcgccggcatctgctattgaaaatagggcagataccgactcaaacagcggcttcgcgcggttatgttttgttcagaggtgccataagggacacacacaaaagtcctacaaattgtctgttggcctgcggacacagtccgtggagtgctccaaacttggaaagacatggatcatcacagatgccagctgcggcatggttagaaataccggattttgcgttcagaatttgtcgccgcatgtttatctggaacttttaagtatctatctcttgtaatattacttatcaaagcacgatatgcttattgcgacagcctttcattgcacattttatctggtcgaagatcttatcgtcctcccgtcatgcgaaggctctccaccccataaacgatcacgcctgtcagccagacaaaaagcaccatcgtaagcggaagcagtccgaaattccaggacagcatcccgataaagcagaccagaaacattccgagcgccgcataattcattgcggtgtaggcacggaacgccgcgcggtatatctgcagctgttctgcctcatcgcagcttgcgatccacgttttctggaacttcagatcgtaaacgcttcccttcttttccggattgatctccttcgtaaaattcacaatccggttctgagcgatcaccgttacgaccataaccgcaatcagtcccaaaaatgtggctgctatttttacccacggaacctcttcctcccagccgctgtctatgccggtggacttcatgccggctgcgaaaaagaaaaatcccgcaatgagcgccacattcgtgacaatcacaccaatgcccagtttccgctcgatcttttcgatcaactgctcttcctcgccgtcccagcgcctgtactctgctctgccgccgcgaagcattcccgtcatccacacagccagagctgccgcgatcacaagatttgcatagggtgcgatcttttgaagtcccgctgtgattcctgcgccgatatccgcctgccccttggctgccatggtcaaaaacgcgcctgttatcccgcccacaaccatggatactaaaagaagcactataaacttgcggaatgctctcctatcctctctctgattctcctcaatcttcgggttgcatttctctgtcccatctgtcatacgcttctcctccctgcctgctatttttcttcctctgattcttcctcataggtaaaaatggcttccaccggaacctcaaacacttttgcaatcttaagcgccaacgtcaccgacggcgaataatccccgcgctcgatctgactgatggtctgcctggatactccgaccagctgtcccatctcgtgctgattgacgttgatttttgcccgatattcttttaaatgattgtataatggcataaatcctccatatcccgatgtgcttttcacacaacgcaccgctttctttgcggcacattttctcacaccgttattatagatatgacaaggaaagttgtcaatacatttttgacaactttccttgtcacatcagtgcatccgacagcgcatgactgacggaacaaccatagcggcatactattgtaaatctgtttgggaaatgctaaaattcagatataagagtatgttatggaaagggaatcacatctaattatgaaagagatcatcaaacataagataacccacaatgtcaaccgcttaaagacttccctgaaatgggtggtattcgccatcctctccggtgtgctggtcggatctgtgggcacacttttttatctgtgcatggctctcgtcactctcgtccgcacaaaaaatccgtggcttattttcctgcttccggtcggaggtattctcattgtaggtgcctaccgcctgcttcacgatgagcgcgataccggcacaaaccttgtactctccgccatccattccggcgatgaactgccgctgcgcatggcgccgctcatttttatctcgacgctgatcacccacctgttcggcggttctgccggccgtgagggtgctgccctgcagctcggcggcagtattggaaacggtctgggacgtctgtttcattttgatgagaaggacaagcacatcatgatcatgtgcggtatgagcgctgcgttttccgcgctgttcggcactccgatggcagccgccatcttctccatggaggtggtgagtgtcggcatcatgtactatgccgccctcgtgccatgtgtgatctcctcgctgatcgcccacgcgattgccacctcgttcggcgtgagcccggacggcttcccgctcggaaaaattccggattttacgatcggctccgccgttgaaatttccatcctcgccatcttatgtgcgctggttagcattctcttctgcgtgatgctgcacggttcagatcatctgtataagaagttttttaaaaatccctatctgcgcgtcttcgtcggcggatgcattgtcgtcgtgctgacactgctcgtcggggatcagacctacaacggtacgggcatcaacatcatcgcccgctgcatggacggtaccgtccgcccggaggctttcttcttaaagatgctttttaccgccgccacactcggcgcaggttataagggcggcgagatcgttccgtctctctttaccggagcggcattcggctgtctgttcggaaatgttctcggattttcgccgaccctgtgcacagcggttggcatgtccgcggtcttctgcggcgtgacaaactgtccgatcacctcgctgctcatcagctttgagctgtttggatatgacgctatgccgtatttccttctcgccatcgcgttcagctatatgctgtctggctactttggtctctaccagagccagaagatcgtctactccaagtacaagaccaactatatcaacaaaaagacgcactaacaggaatagaaaagcgctgccacacgaggcgctgattattatgagtgataccaggaaaaataggagccaaacgttccggatgatatctgtccaagacagatctgaccgtaaaatccggtatttctaaccatgccgcgtccggcatctttgatgatccgtgtctttccaggtctggagcactccacggactgtgtccgcaggccggcagacaattttagggtgttcgtgtgccccttaccgaattgctgaacaaaacataaccgcgcgaagccgatgtttgagttgccatctgccttttttttaatggcagatggcagcgagtttcggttcgcgcggttttatattgtctgtgaagcaattcgattaggggcgctagaacgcccgcccattgtctgcggcttgtcggacacactctgtggattgtccagacgtggcaaagacacagaataggatgtcagacgcggcatggaagaaatactcagattttacttcaaagatctgccttggcagatacattcgaaactttgtgccctctaatctcctatcctgtcactcatgctaatcagcgcctcgtgtgacagcgcttttctatctcctattctttctcgatacaacggtcgagctgtgcgagcagatcttcgtacttgcagagcccctgcttgcgccagtcgcattttccacagttctccataaagaaatccatgttcatcgccgcgcgtgcgtgtctgcacatctcgcggtatgtatagaccctgttctcctcgagtccgaagaattcgatgacccggcggtctttgttcacgacacggttgtggttgtggacgcactcgttcatctccgtccggttcggacagtttgcacagatcatatccggttccgccaccagaagaagttcctcgtccggatcttttcgcaggcgctccaccaccgccgtcatattttcacaaaacgcaccgctgtagccttttccctcatagagcgaagtacagacgatgtgatgccctctgaatttgtctgccatagcaactgtacactcctaaactgccgcttttgtcttctcttccagaatatttcctgctgcaagcgccttgcggatcggaattgccaccagatacgcgcccacaacggagatcacgtccttcacaatgtaaggaacagataccgctacgaaagcagccggaaacggtgtggcagccacgatggcgaactgaatgacaccgagcagatgacacacagcaagaccggcaagtcctaacagcacgcggagccagatctgcttctgtgccatgcccacgccgcagagcattgtcaggaaaatgaatccccagataaatccgccgctgtagccggcaagccaggacggtccgcctgtcattcccgcaaacaccggaacgcctactgtaccgagcaggatatagatcaatgtggatgatgttccctttttccagccgagcacatagccgcacagcgccattgcaaaagtctgaagtgtcaccggaacgccggtcggcatcgggatcgtcaagatggacaacacgctaagcactgccgtaaacatacccactgttacaattgtctttgttgaaatcttcatgattctcctcgtttccgcaggaatcgcatattttaccgctctttcctgctgtttttcgcgcagaaatcccctgtgggtctctctgtctgcaaaaacaatcataacacttttttgtcgattgtcaacctgttttgtctcgcggttgacaattctctaattgcatttccggttctttccaaaaatcaggtcgtaattgatactgtgatagaaaacctcctcgatatcacaggacgatatatcatagttgccaagcatccacatcaccttcgcaatcacggactctaacgtcatatcgtaggactctaagaagcggcaatattctttcatgttgtggccgacctcgtagaccgtcatatcgcttccctcgtgcgccacctgcgtcgccatgaccaccagcttgtccggatgctcctggcacagccggtaaaactcctctgcgatagactgcggtataccgcccacgccaaagctctccacaatgatacagtcataattttcaaaaatactctttaacaccttgggacggattcccgggatcagcttcatcaggaaaacattttcatccagcttctcatagaaccggacttcctcctcgtacggaagcatggggatatagcgcataatattcatgtcctgtatcacggcgagcgacggatagtcaatactggaaaatgcattgtagctcttggaccgcaccttcttggcgcgggttccggcgatgacttttccatcaaacacaatctgtaccccctgtgagcggtcatcggcagcatataaaaagctgtcgatcaggttcgacttcgcgtccgtgatctccagatcgatcggcttctgcgcaccggtaatcacaatcggctttttcgtgttctgcaccatataggaaagcgccgctgccgtgtacgccatcgtatctgtcccatgggcaatcacgaatccgtcaaaatcgtcgtagtgctcccaaatcgcatgaaccatgagtttccagtgtgacggctccatgttggtgctgtccagatttaaaagctgaaccgcctcgacatcgcagatctcttttacctgcggaatatactcgatcagctcctccggtgtaatctgcggttttaagccgttatccgactttctggacgcaatcgttcctccggttgccagtaataaaatacgtttcttctgctgcatactctctctccgttctatcgtaataatcccctcagtgcagcaagaagcgcctccacgttttcctctttggttgcccagcaggtacagatgcggacagcgctatgcgtatcgtccacacgcgcctgatattcaaatgcaaaatcgtcttttaacttttcaagcaccgcatccggaagaatcacaaactgctggttcgacggcgagtccacataaaattttacgcccatgtcctttagctcatcatggatcttttccgcaagccttgatgcatgcgccgagatctcaaaataccttttctcctcgaatagcgtgaggaactggatgccgagcagtctgccttttgccagcatgccgccccgctgcttcatattgtaacggaaatcgcgcttcaattcctcgtttgtgatcacaaccgcctcgccaaagagcgctccgaccttggttcctccgatgtagaagacatccgtgagcgccgccacatcggcaagtgtcagatcattttcccggcatgtaagaccgtagcccagtcttgcaccgtctaaaaacagataaagccctctctctttgcagacatcatagatcgcctccagctccgcttttttatagatcgtgccaatctccgtcggattggaaatatagaccatcttcggctgaaccgtgtgttcaaaacttgcgtcggcataatgcgcgtccgtatatgcagcaatctgctctgctgtcagtttgccgtccgccgtctcgatcgtaaggcacttgtgtccgcaggactccagtgctcccgtctcatgtacgttgatgtgtccggtcaccgcagtgatcacaccctgatagtgtcttaatgcagccgaaatcactgtcacattcgtctgtgttcctcccaccagaaaatgcaccgctgcctccggtgcggcgcacgcctcttttatctgctccgcagctgccgcacaatatacatcctccccgtatcccggggtctgttccatgttggttgccgcaagtctctctaagatcgccggatggcatccctctgtgtaatcactgttaaaccgtatcatctttctgattccttttctctatgtatttgagacgcgaaccagctccttcagcttccgtgctgccgcgccgctgtcgatcgcctctgccgctaattttacacccgcttccatagattccgcaacccctccgacataaagagttgcacctgcgttcaaaagaacgatgtcacgcttggcgtcgcgctccgttccgtccagaatggctctcgtaatctttgcgttttccccgccgcttccgccacgcagctcctccagcgatacgcgcttcataccgaactgctccggtgtgatggtaaatgttgtcaccgctccatcccggatctcggataccgtggtcgctcctgtaagcgtaatctcatccatgttgtcctcaccgctgactacatacgcgcgctccaccccaagtctgctcatcgccgtcgctaccttttccgtgagtgacggactgtagacaccgaccaccatattttttgcgcgggacggattagcgagcggtcctaagatattaaagacggtacggattcccatctcgctgcgcgcctgcccgacatagcgcatggacttgttaaaaagctgcgcaaacatgaaaccgattccggtcttctccacacactcctccactttcttcggatctgccatgatattgacgccgagcgcctctaacacatccccagcgcccgatttcgacgagatggagcggtttccgtgttttgccaccggaagtcccgccgcagccaccacgaacgccgacgtagtggacacgttaaaggtaaatgtgcggtctccgccggttcccaccagatcgatataattgtcaactttcggggaaatcgtctcagccttgtcgcggagcaccaccgcaaatcctgccagttcatccagcgtctcgcccttcacgcgctccagcgccagaaacgccgcgatctgcgcctgcgtcgcatcaccgcttaacatgatgtccatcgccccttttgcttcttcctcagtcagattctctccctcagcaacctttgcaatatattctttcatccctttttccccctctatgcgttcagttcctttttaaaggtccggcagtatgtctccgccgcctccggcgcaaagccctgctcctccagcagcctgataaaataacttccgacgatcgctccgtcgatcagatccgcaagcggcaggacatccgccgccgtccggatgccaaagcccatcatcaccggcagatccgtcgcttcccgtaccgaggtaagatagcttcttacctccttatggaactctgctccctgccccgtgacacccatggacgatacacagtagacgaacccccgcgctccggcgagaatctttggaatccgcgccccggacactggcgacacgagctggattaagatcgtatcctccgatgcatctagcgctgtcataagttcctcctgctcctcaaacggcagatccggaacgatcagtccgtccacccccgcctcattgcatctttttacaaacgcttccacgccgtagtgcaggatcgtgttgtaatacatcatgaagatgatcgggaccgtcacaccctccgtgcgcagttcctgcatcattgcaaaaatcttcttcacattcaccccgccgcagattgcacggtacgatgcgtcctggatgaccgatccgtccgccaccggatcggaaaacggcacgccaagctcaatcacgtcgcagccgccgcgctcctgcgcccggatgatttcttttgtggctgccagatccggcagtcccgcggtaatataagtaataaatgctttctcctgctttttgctgcaggcgttcatacgcgcttctattcgattcatatctgtcatatcctccctcgccggacaacttcccggcttaatttaaatatccttttcctgcaagataatctgcgatcgtattgacatccttgtcgccgcggcccgacagacagatgaccatggtctcctttgcagcctgcttctcaccgaccgcctctttgcgctccctcgcgtacttcatcgcataggcgactgcatgggcgctctcgatcgcaggaatgattccctccagtctgcacagctccatcagcgcatccatcgcctcatcatcccggattgccacatatcgtgcgcgtccgcactcctttaaatacgcgtgctccggaccgacgcccggataatccagccctgctgagatggaatgcgcaagctggacattgccgtccgcatcctgtagcagataggaacgcatgccgtgcagaactcccggctcgccgagcgccatcgccgacgcgtgttccccggtctcgattccctttccggctgcctccacgccgatcagctttacccccttctcctcaataaaatccgcaaacatgccgatggagttcgatccgccgcccacgcatgccatcacgacatccggaagctttccctccgccgcaaggatctgttttttcgcctcgcggctgatgacgctctgaaactcttttaccatcttcggatacggatacggtcccacggcagaaccgatgatgtaaaaggtatcctccgccgtctttgcccaggtacggatcgcctcgttggtcgcatcctttagtgtattgcttcccgatgtgacactgacaaccttcgcgccgagcatctccatgcgcatcacgtttaacgactgtcttttgatatcctcggctcccatatagaccgtacactccatatcaaaaagtgccgcaccggtcgccgtcgccacgccgtgctgccccgctccggtctctgcaatcacctttttcttgcccatgcgcttcgccagcaggatctgtccgatcacattgttgatcttgtgtgcgccggtgtgatttaaatcctcgcgctttaagtacattttcatgccgtacttttcactgagacgctccgcgtaatataacggggtttctctcccgacatactgttccagataatagtggtattgtttgagaaattccggatcacggattgcttcctcaaatgccgcatccagttcctccagggtattcatcagcgactccgccacatactgtccgccaaatgctccgtaatatgctttcctgttcatgtctcgtctttcctttcctgatcacgttccgccgcgccgtcttcttcctgctcacacgccttctgttttttgcacggctttcttaaattttttaatcctgattatattttttgttctcattccatcgcacagcgtttccacgccgctgctgacatctgcgacatcgggggcaaagattctgattccctccgccacattctctgcgttaagtccgcctgccagcacaaaagtacgcccctctgccagcagtttctcccggaatgcacgcacggcgcagcacatctcatcctgcccgtcctgttcccagccgaacgtctttccgctgccgtattccccggcatcgagcacaatcccggcaatccggtgatattcttctctgcgccatcggcgaacctcggcaggatcacggaggttgactgccagccacaccggcagcttcgtctgcgctgcgatccgctccgcctctgcggcatccacgccatgcacctgcagcagatcaaatcctgcccgcccgatgtcctcgatcaacgctctctccggcgcgaccgtcacggctacttttcttatacctttatttaatttttcaaatagttgtcttgctttctgcactgtgacataacgtttacttttctcgtacagcacgaatccggcgtaatccacacctgtctcattgagcgctgctatctcatcctctcctgtgatgccgcagatcttgatcttcgtcaatgtccatcctccctaccgctgcttccagcgcgctgccacctctcccgggtgctccgcctccataaaggctctcccgatcagaaatgcattcacaccgcatgcttttaagaactccacatcctcatccgatacaatgccgctttccgccaccagaagcttctcctgcggcaccatgcggcttaatcgctccgttgtttgcaggtcaatggaaaaatccttcagattgcggttattgacgccgatgatctttgcatccaactttaacgcccgctccatctccgcctcgtcgtgtacctcgactaacgcatccagccccagctccccggcaagctggtagaattcatgcatctgcacatcgtctaagattgccgcaatgagaagcaccgcgtctgcaccgattgcacgtgcctcatagaactggtacgggtcaatcatgaaatccttgcgcaggatcggaagatcggtcatctgccggatctgttctaagtacgccgtgcttccgtcaaagtgatcctcctccgtcaggcaggagatcgcatccacagaagcattgtattcctcaactctatctaataagttaatcttgcttttaattttaccgagacttggggacgcctttttgaactctccgatgatggaaatgacatctccctcaagcgctcccttaaaatcatgatggctgctctcatacgcctccgccagctttcgcatctcctgctccggtatccgtctcttatgttccggcagtcttctttttttatcgctcacaatctgatccagtatcatacgctgctcctcccttaaatgacacccgacaggaaattctcgatcatccgctttccgtgttccgtgtagatggactcggggtggaactggagaccgaccaccggatactctttgtgccgcatcgccataatctcgccgtccgcggtctgcgcggtgactttcaggcactccggcagatcgtctcttagcaccgccagggaatgataccttgccaccttaaccggcgtgtcgatcccggtaaaaacaccgtccaggcagtgtgtgacttcggactgttttccatggaataacgtcttcgcataactcacggttcctccgaacgcctcaccgatgcactgatgtccgagacagatgccaagaatcggtattttattgtagaaatgttttacgacatccatgcagattcccgcctcttttgggcttttaggtcccggtgaaagcacaatgcgctccggctgcatatcttctatctccccgatcgtaatggcatcgttgcgtaccacccggatgtccggcgtgaaggttccgatatattgatagaggttataggtaaaggaatcatagttgtcaatcaaaagaatcataagttttcctcctccagaagtgttcttgcaagcgccatcactttgttgcagcattcctgatattcttttcccggcacggagtccgcgacgattcccgcgcccgcctgcagatagacctctctgcccttcttgatcatcgtgcggatcgtgatgcagaaatccatatcaccggaaaaatcgacataaccggtcgcaccgccatagagcccgcgccgcaccttctccagttcctcaatgatctccatcgcccggatcttgggtgcaccgcttaacgttccagccggaaggaaggatgccagcagatcaaacggatgatagctgccctttttccttccctccaccatggatacgatgtgcatgacatgggaataattccgcacattcataaaatctgtgaccttgactgttccgaattccgagatgcgccccatatcgtttcgcgccagatccaccagcatcacatgctcggcacgctctttctcatctgccagaagttctctgcgcagcgcttcatcctcctccgctgtctttcctctcggtctggtccctgcgatcgggcaggtaaacacacgctttccctgctgttttaccagcatctccggcgaacttccgatcacctcaaaatcaccgaactggaagtaataaagatacggcgacggatttaactcgcgaagctccttataaagagaaaatccgtcacgtccggtctccaccgtccatcgctgggagagcaccgtctgaaagatatgtccttctctgatatagtgtctgatcttctccaccttcgcgctgtaagcggcaagcgtatccgactttttgcggatgacgccgtccctttttccgccctccggctgcgccgcctctttcatcccgtgcccggtgtccgcttcacacctgctgtcacatcctccctctgtctgctccggatgcatggcgcgacggatcatctcttccgccgtcacgccggcacgctttcttccttcctccgtctcctcctctaagacaaccgcggtcagcgtctccgccacatagtccatcacgataaacgctttcatcaacatcagctgaatcgtctcaatcccgatctcatccggattcttctccggcagtttttccgagtagcggataaaatcgtagccgacattgcccaccagtccgccggaaaaattcagttcgtcattctccttatgaatctcaaattcgtcataatattcttttaacagcgctaacggattgcccctgcgcacctcgcgctccccgctcttttttgtgatgacaagcgactccccctccgaggagatcagttcctccggttcccccaaaaacgtataccggtcatagttcttgtcatagctctcgagcagaaatccctttctgcttccgaccagattctcgtacatcgccgtcggcgtctcgttcacaatgctgactgttttcttgtagaccttatagatgcgcttcataaatcctcctctttcttcttttaattcatagaaaatgcgtcccatcaagaaagaatcctgaccggagagctttttaattcattggacgtaatttcccatgaattaaaaaaaatccctgacccggtaaaccggatcagggacgaatatctcgtggtgccacccttcttctcttatcatgcctggttttttctgtcctctttgtaaccgtcctccctggatgtttctgacagaagatacaaaaagcggatacctccaaactggaaatatccgccaccaatcatgtatagactctcagatacagatgttctctatatcgtacccctgtaacgtgaggacacggcttccgctactcggctgctgttatccgcctttcactttgctctcgcaaatccattccatccatactatcctgcctgctcccaccgccccaggctctctgtgaagaatcgtacagtgtactccttttgctcaacgatttctcatttatttgtcagtagtttatcgcactaatgtggcaatgtcaagaagttttttattttcccgtcaccttttttctatcaatatgatatactttaagcattgatcctgttacaggaaatggaggagctctcagatgaacaatgatgtatttgaaacaatgcccgtaccgaaagcctatttcaagatggctctgcctgtggtgttcggcatggtcatcagccttgtatacaatatggtcgacacatggtttattgcaaagacccagaacaccagcctcgtcgccggcgtctctctctgcgccccggtgttcagtctcatgattgcattcggtgatattttcgggcttggcggaagttccgccatctcaagacttttcgggaaaaaagattatgacaccgcgcggcggatcagtgctttctgccttctcggctccatcttcttcggcattgctgttgccgttctgatgctgctttttcagacacccattctgcatcttctgggtgccagggacgataccatcgcctatgccggcgcctattaccgctttctggttctcggctgccctgccattatctttaatattgtcccggggaatctgctccgcacagaaggtctggcaaatgatgccatgattggttccgtcatcggcgctgtgtttaatatttttttagatcccattttcatcttctctctgcatatgggtgccggcggtgccgcacttgccaccatcctgagcaatctgcttgccgactgctatctcgtgtgggttgtattcaaaaaggcagggcatctgtcgatgtcctgccgcgaaatgcatatttcatccggtcatgtccgtgacattctgctgatcggaattccggcttccatcacgaacctgatgcagagctttgcggtactcctcaccaaccgttttctgttaccttacggttctgataaagttgccgctcttggcattgccttaaaagtcaacatgatcaccatgctgattctggtcgggttcgccttcggcgcgcagccgctcctcggctactgctacggtgcagacaaccgcgaacgcctgaaacagtttctgcattttgatctgctcgtgcagcttctcattgcgctcgttttcacagccgccgcctgtatttttgctccgcccatcatccgcatcttcatgcaggatgacgtcatcgtggtctccggcgccctgatgctccgttgtctcatgattaccgcccctgtgatcggcatgatcttagtcttcaccacactattccaggcagccggcatggcgcttcccgcttttctgatgtccatcagccgccagggcgtgctgctcgtgttgtgtatgctgctcttttcttccctgttcggctacatgggaattctgctcgcgcaggcagtctccgatgttctcaccggaattctgggcttccttctgctgcgcagatcaaaaatactgctctgatgcgccgtgcgtcacaccgtctctgcgctgcggtaaacctgctcaaactcttgcggtattatgcttcccgatgtcaacaaccaccgcaccgatggacatggaagactttacgtgatccgggagcagggcaatcttctccttgtacagcgccgcaactttctttgcgtacttctgaatctctgcttccttgatcggcacccgctgcccgtgtccgcgcagaatctcatcgaattccatatagcgcacacagcatccagctcttccgtggtaaacaacagatacatggagaacaccgaaaatgccgactcaaaccagtaaatgatttttggcagtgcaatgcggcagaactccgcaaaaaaccaagcacataaatcaccgacgccagcgcaaataaaatacttccgacctgcgctctggaaggtctcgcctgtgttattttacatattgcaatcctctgcgcaccggattgcgcaattttgcgtctccatatgccgcattgcctgcaccatcgccataaaatcctgctcctttaacagcgcgattccccgttcttcatctcccagaaccatcagtacatcccccggctttatgtcaaaaattttcctcgcctttgccgggatcacaatctgccctttttcaccgacctttaccattccaaacgcatgctttcccttcggcgaaaacggcaggcgcgtctccccgccctcataattgaccagttcatccagcgtcacatcaagcacctcggcgatcagccggctcttctccacatccgggagggactctcccgtctcgtatttggaaagcgtctgcctggacacatcaatcttctccgccagttcctcctgcgtcattccacgcatcttccgcagcatcatcagattatccttgaacatgttttctctcctttttctctccaatcacacaccatcttatgaccggaattctttttatcagctcatagagaagatagccgcccgcgtaggctgcaattcccgacaaaaggtaggctgcaccccccgtaacttcggtgtaccggtccagaaaatatgccgccgcagagagcgccagataatggaacagatacagtccgtagctctttttagaaagccactccgtcttttgcgacgtccggttaccccagcgcttcattcctcccagtactgccagacacaccgtccagccgtacaaaatggaaaacggactgtttaccaccggctcctctgcataattttctccgaaataataccgcacataaaaaactgccagcaccacagccgcggctgcaagcggaacgctcacgcgcgccagccggtcggtcactttttcatgggaaaagacatagtagcccagaaggaagcagatgccgtatattccgaaacgatacacacagatcaccggcgtattcaagatctgggcagctccccagacggaaatcacaagcagaaaaagaacgggcagcgcagctttttcaccaaacgcatacaaccggtctttttctattttgcgaagcagcaccagcaataccgacaatacccagagcacctggatgtaccacaagatcccgactccggataagaccatgatcagatacccgaccgccttcggcactttctcccacgactggtcaaacacatggctgaatgccatgttgaaatacccctgtatccaccagaacacaaacagaccgatcgtcgagggcaccagaagctttctcgttcttcccgcaagaaattcccggtcgctatgtccttccagataatatctggcacacattccagacaccagaaacagcagcaccataaaccacggatacagcaggtactgcacggcatcctgatactgtacctcccaaaacggtccgatcactcccgccgtcaccacgccgttatacataaaaatcacatggtataagaccacgagccccaccgtgatccagcggatgttatcaagatagtgtcttctcatatttttcccacctttgctctatattttaactcaagtataacaaaaatggaatggctgctccaccgcgcttccattccattttttatgctttctgttaaaaatcgttgcatttctcttatcatctgttgtacagacagaattccgtcagggattgcatctcttgcacggatcatatccggctgcaatcagttcctccctgctaccggagaatgccgccttgttttccggcgacatctgcgcaacactcgagcaggatggccggtgaaacttctttgtgttcgtgttgagcacgtattctcctgtcacatccgctgtgccgtccgcggcagtctctcccccggatgatgcctgtgccgcgcttcctgcggtatctgccgccacggatgcctgcgccgcgctgtctgcggtatctgccgtcccggatgttcccgtggtgtctgcgctgcctgccgccgcatctgttaccccagctcctgccgtcccggatgttcccgtggtgtccgcagcacctgccgcgacctcatccccgtcccggtaatcctgcgtcgcgtccacgctccagctaagggaggttccgtcacttgtgaccgtgatggtcccctgcagatccgtccggtagagcgctgccccgcatgccttcacccggtttagtaccgtgcgcgtcggatggccgtaagagttccccgcgccagcactgaccacgaccgccgtcggcgacacggcgcgcataaacgcttcggaggaagaaccctcactcccgtgatggctcgccagatacacgtccgactccagtgtcacgccggagtcaagcatcacctgctcttcggcttttccggcgtcaccgcagattaaaaagctggtgtcgccgtacacaaggcggattccgacggaattatcgttatcctccttcggatcataggcttttgggcagaccaccgtaaaagaagcgtcgccaagcgtgtaagtgtctcccactgccgggtaggcaagtgcaatatcctgctcctttatcacgcgctcaaacgactcatagactctggtatccgtcacgtaatcgggagcaagcacctgtccgcaagaaaatgcgtgcagggcgccgaccacaccgtttaagtgatccgcatcatagtgagaagcgatcacataggcgagttcttccacgccctgttccttcagatagcttaccacaaacgaggaatagtctctgttgccaccgtcgatcagcatatacgctccgccctgctccactaaaacggcattgccctgaccgacatccaaaaacgtcaccgacagcgttccgtccggcatctgctcttctctctgtccttccgtccctgccgtcgatgcttctccgttctcctgctgctctgccatctgctgctccgacatctgcccgtcctgcaaggctcccccggacagtgctgcctgctgccttaccgcctgcccgtccgatgctgctccgcatcccgacagcaaaagaaacagggccgcacaaagtgccactgccccgcttctgattctattcacgttgtatttcttatttttctgcttccccgctgtctgcatgtcctttttcctcttccataaaatacatgcgcgcagcgaaatcctgaaaataccgcacctcactgttgtatccggttccgccgaacgcctgtttaagcttcactccatgatacattaacatatctccggctgcatggcaatcctcgatctccccgtccatcttcttaaatctggcgatcagatccagcgccagcgaatcctgcctgatgtgtaccggtgagacggtattgaccagatccccgaaatccttgatattgtattttaagctgcggttatagaaatgataccgcgcatcgggttttaatcccttcgcctgatagctgtgatactgggtattcggtacgaccaacttctgcatcagcatccccaccgcgcgggtctggtcttccgacacgcaggtccactccatctggtttcccacgctctgggagagtgcactttcatgcgccccctctccgaatgtgcgtccgcggtaaaaacgtcccttctgtaacacctcccgccactgtttgtacagtgcgatctgcgcctttaccgccgcaaaatcctcgctggacagatcgcagaaattgcactcatagccgcagataccgaacgccgccacagcgaaccgtgtctcaagcggcgtcacgcggagcgtctggtggttcgggcacgccgacacatgggcgctcacaacggacatcggatagccgtaggaatagccggtctggatctctgcccggcagagcgcatccgtgtcatcggacgcccagatctgtggaaaataggacaaaattccgagatcgaaccggttgccgcccgccgagcatccctcaaagagaatatctggaaaacgcgcggtaagttctctcatgcagcggtacagtcccagcacatagcggtgtgccacctctccctgccgctccggcggaagcgctctggaatagtaatccgtaaacgtccggttcatatcccatttgacataggagatctccgccgaggaaaatacctttgtcatcgtctcaataatatagtcctgcacttctgttctcgtaagatccagaatgcgctgattgcgtccctccgcgtgcggttttcccggaatctcgatcgtccagtccggatgtgcctggtagagatgactgttcacattcaccatctccggctccacccagataccgaaatccagcccgagcgccttgatctttcttccgagtcccgcgagacctcccggaagcttcttctcgttgacttcccagtctcccagggaatgtgcgtcatcattgcgctcgccgaaccagccgtcgtccatcacaaaaagctccacgccggcttcctttgccttcttcgccagagcaagcagctttctctcattgatgtcaaaataggctacctcccaactgtttaacagcaccggacgcaccttgtgcttaaacgctccacgcacgatgtgctcccgcacaaatgcatgcatgcactggctcatgccattgtagccctcacaggaatacgccatgaccgcctccggcgccgcaaagttctcccccggagccagcagccaggaaaatgactgcggattgatgccggcagtcaggcgcatcttgccgtagccgctcacttccgccgcctcatagtggttgccgctgtagatgaggttgcatccgtaacattccccggtatcctccgtcgtatccgtctttgcaatcatgacgaacgggttggcacggctggaggaggttcccgtgtaggacgcattgacatgttttcccgcctccatgcgcgtatcggaacggtgcatctccctcgcccacgcaccagtaaaggttgtgaacacatactctgccggatcaaagtctatctggatactcatcaggcgattcagacgaatcatctccccgctctcattgaagagaacggcgcttcgcacaatcgcatcgcactctgcgtagacatcataatgaagttccagaacaagatcataggaatggtcgcgcagccttacgctgagacgctgcgcctcccctttctcgtcgtaagctcccgggagatctccgttttctgtctccgccgtcttttctgtgatctcatagctttcatagcggaaatccgaagtggtgctgccatccgcgtgcacgatctccacaaacggttcgcggatgtctccttttccgtaggaggacatctcaagccgcatgtcctccagggagaacgccggatgctccccgtcgcagagattcgtatttcccggtgcaaatgtatgcttctccatcagcggagcaacatcacgctccgccggatgctccggcagtgtcaggtgccttccataatacaggtgctccaaatgccctgtctccattctccagaagcagtatgtcgtatgtgccgtctccagcacaaaaatatgtccgtctgcttttatcatttagtatgcccctttcttgacctgctctgcgatctcggcaaccttctcctccgtcagaatgtactttttgtggaaaatgaaaatgccgcacagaaggcagatcatcgggagaatcgtcatcgtcatgcgcagtccgaccaccgaagatgcggcagccgtcgcaactgctgcggtatctgtcgtatcgttgctcagattgcagatctgtaagcagatggatgcaatcagtgccgccacgccactcgccagtttgaccacgaaggtctgcatggaaaagatcacgctctcgtcacgtctgtgatttttcagctgtccatagtccacggtattggcgagaaacaccgtcgtcagcaccgtcagcacaccgtttgccccaaagataaagaagcccgggataaacagcagtaccacattggacatattggtgaatgccagtaccaaaagcaccacataaccgatgatcgccatggcaaatcccgtgtagaacacctggatggttcccatgaatttgcgcagcagcgggaataagatcatcatggacagaatctgtaccgctccgccgaacgtattaaacaaggtgtagctgttgtaccagccctcgccgccgaaatcgtatttaaagaaatagatgacaaggtttgaggttgtatagaccgcacagttgattagaacaatggtgatcacgaccgtcatcgcctgatcgttctgaatcagtgcgcggaacatctgtcccacggacggggaatccacattgacggtggatttttccttgacattgacgcaggtgatcgtcgtaaagagcacaaataaaatcgcaataatcagtgcaaaccacttgaatcccacgcgctcatccccgccgccgagacggtatacgcataacatcgtgatgattgtgatgatggcagagccgacgcccgcacaggagcgcgccatcgtggaaagtccctcacgctctttgccgccctcggtaaacgccggaatcattgaccagtaagggatatccatcatcgtgtacgtcacaccccagagtacataggtgactgctgcataggccaccagaccgcctccgtcgagtgccggcggtgcagaaaacatcaggtagagcatgatggcatttaaaatcgttccgatgaaaagccacgggcggaattttccccatcttgttcttgtcttggcgacaaccacgcccataatcggatcgttgaacgcgtcaaacacacgcgctgcaagtaagatcacgcccattgcaaacgcgctcaccccgagaatatcctgataataatacagtatgtaacttgcggaaagcatgtacaccatgtcttttccgactgctcccagtccgtaggagactttttcttttcctgtcaatttcatgtgatcctccaattctgcgccttcgcgctccccttatctcttctccatcgcaagctctaccacgcggtaggctccgtcgtaaattcctgctgccttgttcttctcgatgcagtcacacatatcgttaagcagcgcgtcctcgtttaagaacagatccagcatctgtaccgtgtgcggaatatctctgcactctaacgtgccgtccccgatctctgcggagtggatggcgccccactgctcatgtcctccgacacgcttgataaacagcttcggcaccgggtagaatgccagctcgctcggctttgtcacaagcacatcgcagcttctcatcagaaggttcgtgcagtagacagcctcaaaaatattctcatgccagaagccgtggatgccgcttacctcactggtaagtgcctgtgcggcaaactctgtcgtatccttccagttattaaaatgctccgttgcaaacttcttcattcccgggatctcgccgatcagctcctcccagacattgcggtaatcaccgacattcacatacagtgcggctctgccgtcccgaatcgcagggagcagatgtttaatgatggaagcaaaaatctctctctgtgctcccgcgcctccgatcgtgagaaggaaacgcaccggctttttctctctcttgcgcgcccgtctcatctcacagtccgcctcgatgttactcaccagttcatggtcgatgtaatgtcccgtatagatcagatcatcctcaggcatcgggcgaagaacgtcagctccctgcatgccgtttaagatgcggtagccctggtaggcgtaatgcgtctgcacggtgtgaatgcttccctccgataaatgcagcgccatcggccagttgtccggaatcgcgttgaccacatgcttcattcccgcatggattgcagcctgcgcaggccacacatgtgtcgccaccaccggaagctccttcggcacattcgcatagaccggagccatcagttccgcatttttctggtccgcggcattgtaggaaagcttccggaagccttcatagttcatcggctcccagaccagacggttgaacagtctgctcttctgggaaagtcttgagcccagggaatacagatcattctgcgcgccaatgacctttgtgcaggtcgtctgcgggtaggaattcaagtccatccagtacggtacatagcccatggaatgtgccgcggatgcgattgccatggaaatacggtaatgtccgaatcccatgcggatgttgccgacgatgattcccttttccgtgtcaaatcccacgttttctcccgtctctcccacacggatgtcatgtacgcccagcatatcgccgatgtattcattcttcttcacgattgcaggataatctgcccctgcatcgtccccgaatttttttgcatatttctttttcgactttaccgctttccggtataccttatccggcatcggattgccaaaaataacttttgatttttcttccattgcctgtgttccctttcttttcttacaacctctgtcgctctgccgctgccgcaaagtgcagttccaccggttcggtctgtgcattccggatgacaagccgcgcctcgccgcactcacccgttgtctttatgtaggtgccgcccattccgccctccagcgagatgacagacggtccgatcagctccaccggtccgctcacctcaaagcttaccggctcattaaagaagcttagcagattgccgtattcgtcccgcgcctcaatccggatggccgccacatcgtaggtgcttttctcctgaagtcctgtgtgatccgcccgcgcaaaaagtacaacctttgtcatcggctttttgatgagttccgcggtcacgccgccgtccgacaccgcctcaaaccggtatgtcgtggaagtgcctccccagtctccgatatagcggttatagagcaccaccgcaccggtcggcttcatgtgataaaggagcagcatcttaagcgccgtcacatacacggatttcggaagatgtgacagtccgtagcgtgcggtcgcatttaacgcatccttgattccctttccctgcgccggtgtaaaatgttcgcccttctcgatcgcatctccgatataatcgtcgatcacgagcggtccgtgcggcagatgtttccacggggaatcctctctcttgtattccttgataaaacggtcgtttttgtacatccgcacactgtccgcgttggtaaaaatgtaggtctcgccgcggttgcagcccgggtgttccccaatgtccatcgaggaactcagttccagaaccgtatgttcctcctgctggcactcatagaccttcgccgccagcttcggattgcggaacatatccatcacgccgtggtaacagatgcggtccccgctgccgaaatccttgtgtgtgttgtagtcgaacatacaccagccgaagcttcctgcaatgtcaccctccgctgccgccgcgtcgagcacccgcacatggcgcagcgcgtgttccgcgcggtgttcctcccagtcgaacgccttggtcggatacatgtggccattgtactcgctgatcagatacggctttttcggatcggatgtcaccgccgcctttttctcacatccctggttcgtgccgtcatgcacaaaatcattgtaagtgtagacgtcttccagaagactgctctttttgtgcgcccgcacaccgcccgtcggtctggatggatcgagttcgcgcgccgccgcgttcgtcctgcggtaaaaatcatcatcgtcctgcgactcgttgatgcgcacaccccagagaatgatggacgtgtgattgcggtactgcatcaccatatcacgcacatttattaccgcctgatccttccacgcctcatcgccgatgtgctgccatcccggaatctccataaataccagaagtccgattctgtcacactggtcgataaagtaatgggactgcggatagtgggatgtccgcacggcgttgacgccaagctcatactttaaaatatccgcgtccatccgctgcatggattccggcatggcatagcccacatacggatagctctgatggcggttgagtccgcgaagctttacttttttaccgttcagataaaaaccgtccgccttaaactcggcatgccgaaagcccgtgaccgtcacgttttcatccagcaccttttcatcccggatgagctgcgtgcacacctcatagcagaccggatggacggtgtcccacgacagaacggattccaccgtatagtcaagcacaagctttgttccggtcatctcgcattcgcccagaagacgatatccgctctcaccgcatcttctgatcttctgcctgacgctaagattctcaccgctgccgtccgccgtaatctcggagatgagtctgccggtgtcaccggaaagatctccccgcacaaacacatctttcagataggtcttctccttgatgtcgagccacacctcacggtagagtccgccgtacgtcatataatcaatcacaaatccaaacggcggtatattcacgctctccctgctgtccaccttgaccaccagcgtgttgcggatgccgtagacggcatcgtcgctgatgtccatcgtgaatgccgtgtagccgcagtgatgttccccgatcttcttcccgttccagtagacttcgctctcatgcgccgccccgtcaatcgtgagcagcagacgttttcctttccattcttctggaatgaaaacatctctgcggtatccgctgaccatctggtaaacagattcgtcaaaatagtgaagcggtgtctcctttgccgtgtgcggaagccgtaccggagtcatgtttcccacgtcaaagccgtcgcccagcatttcttccgtaaattgctccgaaaacttccagtcgtcatttaaatatactctgttctccatgttctacctttgcctgtcaccttcctgcattgccacgcgtttatcccgccgcctccggcaccacaattccgtttaccagaatcgaaaccacctcatcgagcgcttccagataggaaagcccgctctgaatcagaatatctctctggaaaaactgttctaccgtggcctccagcatcatctttacgatcggaatgctgaccttgcggaccacgccttccgccattccctgctccagaagctggatcgttgtctcccagccggtctccagtcttttttccacctgcttgtagatcaccggatacttgtcctttaacagatagagctgtctgaaatccacatcccggtaactctccggaatcactccgagaatccgtcttatcttctccaccgtagagagcgcgtcatcctccacaatctgctgttcactctccttgatggaatcgaacatgtaatccaccatcgcaagaaacatcgactccttgtcgcggaatacggtatatatagtctttttactcattccgaggatcttcgccacatcgtccatggtgaacttcaggcctttctcattaaacgctttgatcgttccctccaggatcacttctttctgctgcatctatgtcacctccctctttcggaaactatttttctttttctggtttcctttattctatcacgatttccaggttctcacaagaaaccgaattcacaaaatcagtttccattttttgtataaatgtactaaattccggtctttctgccgcctgcgcgttcttgcaatcccgccgtacaatgggtataatatggttaattacagacatggaggacatcatggaaaacgatcatatcagaacgattcttaataatattgaaaacggaacgctcaccgcgagcgaagcctacgcgcagttaaagctggctccttttgaggatctcggatacgccaaggtcgatcatcaccgcgaagtgcgtcagggagcgccggaagtgatctacggagcctccaagaccaaagaacagatcgagggcatcacgaacagtctgctcgcccactgtccggagaatatcttaatcacgaggctttccccggaatccgctgcttacctttccgagctttttacgctgttctacgatgaggcgtcccgcatcggcattgtgaaccgtacgccgcatatcacagcggagggaaccatcgtcgtagccacaggcggcacgagtgacattcccgtcgcggaggaggcagccttaacggcagaagtgctcggcaacaaggtcgtacgcgtctatgacgtcggcgtcgcgggactgcaccgcctgctctccaacatggagctgctctcatccgccaatgccatcgtcgccgtcgcaggcatggagggcgctctcgccagcgtcatcggcggtctcgtggactgccctgtcatcggcgttcccacaagcgttgggtacggcgccagctttcacggcatttccgcgctattgtccatgctcaattcctgcgccagcggcgtatctgtcgtcaacatcgacaacggcttcggcgcgggctaccttgcaagcatgatcaaccacatcggcggctgatcacaccatccatcactctaacaggaggtttcttctcactatgaaaacaatttatctggaatgtaatatgggtgctgccggagatatgctgatgagtgccctttatgagatctgcgatcagaaagaatggtttttgcacaagatgaacaccgtctttgccccttatcatatcgtgctttctccggaatccgccgtaagctgcggtatcaacggaacccacatgaaagtaacggtggacggtaccgaggaggtctctctcgatgtcaaggcgggacatgcccatcacacgcatgcagagagtccggatgcatcctttgcccacgaagcgtccgattctgcggaggacggacactcccacacgcacaccacctacgccgccgtctgcgaggagatcgcatcccttgatcttcccgcagaggtaaaggacgatgcgctcgccatctaccgcctgctcggagaggcagaagcaaaagtacacgacaccacgttagagcagatccattttcacgaggtgggaacactcgacgcactcgcggatgtggtcggctgcgcgcttttaatccgcacgatcgcaccggagcagattctcgcgtcgcctcttcacgtcggaaacggctttgtaaaatgtgcacacggcgtgctgccggttcctgccccggcgaccgcagagcttctgcgcggcattccgttctacaccggctccgtgaccggcgagcttttaaccccgacaggtgctgccatcctgcactactatgtgctgcgctatctcccgatgccaaccatgaccgcgtcggagatcggctacggcatcggctcgaaagatttcggcatcgcgaactgtgtccgtgcttttctcggcgacaccgcctcctatctcgctgccgaggaggaggagccatactcctgcgacgataccattttatcgatctcctgcaacatcgacgatatgaccggcgaagcgctgggacttgcaacggagatctttatggcagccggggcactggacgtctttacaatcccgatccagatgaagaaaaaccgtcccggcattctcttaacctgtctgtgtgagatggaggaacgtgaaaaattcacagggcttttcttcctccatacttcgaccagaggcgtgcgctaccaggtgttcgaacgcgcaaagctggaatctacttttgagacgcgcaagacctcgtacggcaatatccgcatcaaaaaaagttccggctacggcatccagaaagagaaagcggaatttgaggatttaaaatccgtggttttaaagaaccactgtgctctctctttgaatgaagtcgagaaatccctgcactaaaaaacgtgcgggagactgcacataccgcagtctcccgcacgttttttgtgtaatgtaatgaatcccagtctacaggttttcctcttcgatcgtaagcatcccgggtcttaccgcaagttccacaccggggcacttttccttgtactgctccatcaaaagcagccagagctggtgaatgtgatccgcaagcaccgccgacatctccacactgtacggcagtaaggtgtgaaggtcgaaaaagcggattccctccggcggcagaaagaccagattgcttgagcgctccttatccccggatttcttgagcagctcataggtaatcatgcagaattcttttccgcggtagttacagctgtaagacgcataacactcatcaatcgtccactttgttccgtgctcctcctcgatcggcttctcggaagcatcatttccctctgtggtctgtacttccagtctccaggaaagcttctgtgcttttgtctccgcaatcatctccgtcagtttacggcataattcttcctgtttcatttctctacctccgtattctcccagcggactgccttcgccttctgcaatgcttccggccgctgtgccgctaccgccgcttcatccgacgcatggcggtccagccagtctgcataatacccgacagcctcttttgtgctgtcaaactgatacagcaggggcttcctgccccagtccgccacatagacccggttatagtccagatacgccgccaccgccgtctcaccggtgtcacggtgcctgtaacactgttccatcaccggttcgccctgcacttctttcagtccggcgcctttgatcttctgctcgagttcttccaccgaatcaaacagtgaaaataactcaagctgtccctcaacattcttccctgccatagccttcctcccgcacaagcccggatcagccccagattacgctctcacatagatctcggacaaattgtccagaatctcgcccgcgacatccggcttattcatagtatagatatgtacgtgattcacgccgttggcaatcagatcgataatctgatccgtcgcgtaagcaattccggcctggcgcatcgccgccggattatccccgaaacgatccacgatcgccaggaaacgcggcggaaccatattgccggaaagcgacacgatcctcttgatctgcgccttgttcgtcaccggcatgattcccgcaaccaccggcacatcgatgcctcttgagagtgccttgtacaggaaattgtacagaatgtggttatcaaaaaacatctgtgtcgttaggaattcacagcccgcatccactttttccttcagatgatccagatcctcaaaaatggtgtccgcttccggatgtccctccggatagcaggcgccgccgatgcagaaatctccctgtgctttgatgtccgcgatcagctcactcgcatgacggtactggttcggaagcgggaaatccgcattctgcggaatgtctccccggagcgccagaatattgctgatctgcttctcttttaactcctcaatcacggatgccaccttttccttcgtggaggaagcacaggttaaatgtgcaagcgccggaatctgatgcttttccacctcgctggcaagttctaccgtatagtcggacgtaccgccggtcgcgccgtaggtcacgctcatatatgccggcttcaatgccgccatgtccgcaacgatatttttgtagttggcaagctgcgccccctgtttgggtggaaacagctcacaggaaatcgtaacctgatcggtctttaataattctgtcagtctcatctgctctatcctttcttctgcgtcatgcctaaaattttctcagcttgtctgttccgtcatccacggtattctcgatcttgcggatcgtgacaaaataagaataatcatcgttgacccgcacttccacgcggtctcccacccggtgtccaagcagtgccttgccgagcggcgactcattgctgatcaagttcttgagtgaattgccgcgcacggtggtgacaatcttatagacttcttcctcatcgtcctcctcgaaatacacggtgacggtgttattcattccgacttcgtcctccgcggaatccgtagatatgatcttcgctgtcttgatcatcttctccagatagcggattctgctctcgttctggttcttgtccttttttgccgcatgatattcaaaattctcgctgagatctccctgggctctcgcctccttcacagcttcaagtgcttccttgcgcacaaccagcttgcgatactcgatctcctcttccattttcttgatatcctgctctgtcagttcatcgtacatgatctatcccatcctttttggctgatgaatttattatagtgattttaggaaatgccgtcaaataatttccgcagatcaacgttctccacaggacaccccgtgatgggatgtcccgcgcagaccgacaatacatagccttttaccggcacttctgtatacagataaaactgcccggcatccgcttccctgaccgccgcctctgctgcaggcgcagtccttcctgccacctgatcctccagcacatcaaacgaagaaagcggcaggtgcagtccttcccctaccgctttgcaatagctttccttgcgcgtccagagtcttaaaaacgcatctggttcactcagcagatacgcattctcctctgccgtaaactgtcttcgcatgacattcacattcacacgccgcacctgttccacgtcgatcccgacttcaccctcatcaaataccgcggctgcataatctcccgcatgggacaggttaaagtgcacccccgccccgccggaaagctccggctttccgtgggtgccgcacaccagatgcaccgtctctgtctctggcaccagaggaagtagggaacagcccatgcttcgcaaaccatactccagcagcagacctgcggcaaggctcctcatgcgatcctgccgcttcccgcagcgtgcaattttctcctgtctctctgtcggaacataccgcaaaagttcctcatacagcccctcatcacacagagcgatgatatttgtcatcagaaccctcatgccgactcctttaacagggtattcagcctgtctctcgccgccagaagttcgtcgcagacaggtaaaagttccgccggctctcccgcacgcagcggctccacaatccgcaccacaatatcgtatagcggaatcagccccatattggcaagcattccctttaatgtatgcgcacattcaaatgcacgccccatctcccctgcgcgcagcgcctccggcagaagttcaaaattctgatcccccgccgccgtgtgcaggcagctgcggtacagctccctgtcgccgatgaaccgtgccagtgcgccatccacgtcacagccccagtttttcagggaatcaaacagttcctccattgtccgtctctcctttatcctttcctccggcaacagacatccgtttcaacagtctgccagcgcccagaacattttccactctgcgcatcgcaatctccggcacgaaaggcttcacgatgtagtcctctgctcccagctgcaacatctggatctggtgtccggtcgtgtcgtccgctgtgatgataatcaccgggattcccgcaaggacggcatcctgctgctttcgctttaggaattccattccgtccatcaccggcatcgcaagatccagcaggataatatccaccttgccggactctctgtttaagacctcaaaggcatccgctccgttttccgcttcaaggatccggtactgttgctcaaaaatgcacttaagcagtccgcgatttacctcctgatcatccacaaccagcatcgtccgctctgtcttttccgctgccagaagtacctgacggtatttctgcagttcctgatccatcatccgctgttccgtaatatcggtaagcgtaccgacgataatgtgcttttcgcccacgctcgtgatgtatttcagcttcagatgtacccagatcgagcgtccgctctttgaagtgcgcaaaaattcgcaggccgcggtctccttcgactttgcaatgtcctcaaacgtgtcgatgagaatcttcctgctctcgtctgagagctgtttttccatcacaagcccaccagaggaattgatatcctcgtatccgaacatgtcatagtaggcgttgttcacgcgcagcgtatcaatccggttctgctctttctcatattcatagatgaccgccggctccatcatgccggagaacacgcttcccatctgtgaagtcgcgttccagagcatatccctgccgatctcgtccttctgatatttctcctgcagttcgtcctttttctcggataccagcttttcataatcggacaccggcatcggtctcgcaaaataaaatccctgtacatactcacatccgacgctgtgcagaaagtccacctgctcccttctctctacgccctctgcaatcaccgggagattcagccattttgccatgcgcacaaccgacgcaagaatattctggctgcgcccctcctgatccgtatccgacagaaatttcatatcgatcttgagcacatccacggcgatatcctttagcacatttaaagaagaatatccgcttccgaaatcgtccatcagaatagaaaatccttccttctgcagacgttccattgtctccttgatcgccttcgggttcgtcgtgtaggcgctctccgtcagttccagttccaacagttcccgggggatgtggtagcggtccgtcagtccgcagattgcctccaccagtcttggattatagaggctgaccctggaaatgttgaccgacaccggcgacggctttttcccctcggcaatccatcctgcaagcagcttacaggtcttctcccagacgtagtaatccagcttggcaatgaatccattgcgctcaaagatcgggataaattctcccggcgagatcatgccgccttccggctttgcccaccgcaccagcacttccgctccacagatcctgttgtcctgcaggctgtacttcggctgcaggtaaaggacgaattcctcctcgtccaacgcatgccgcatatggttgacaatctgctgttcccgcacgatgtcttcccgcatctcatccacatagaacgcatagttttcgatgtaattgcctttgcactgcttggcagccagattcgcccggtcgtacatcgcatcgatggagagatcccgctcccggatcacatagattccgattgccggcaccacatcaaaagcgagctggtactgtccaagacgcatgcgcatgtagcgcacaagctctagcatcgcctcctcgcccctgtacggcatgcagatgccgaaaatgtccgcctcgattcttccgtaggcaatctgttccgtatctcccgcaaatttccggatctccttcgcgatatactgtaaaagtccgttgccgctgctgcttccgaagaaggaattcaccagttggaatttttcgatgtcgaggcgtaaaaacgcatacgtctcttcgggatgtctcttaagcagaacacgggttgcttcaaagaaatgcgtcttattgtaaattccggtgagcatgtcgtaatctgcacggtatctcaattctctcgaaagctgctgttcactgctgcgcaccgcattttccacccggaaccgcacgatctgcggatcatacggttttcctataaaatctcttgcccccagtgccagacatgccttttccgtcttgacgtcacgctccacagacgccacaatgaccggtatccggcggtaagaatccactttgcggtattctcttaaaaattcaaacccatccatctgcggcatgaccagatccagaatgatcgcagatatcgcgtcaaactccttctgcgattccagaatccgaagtgcacctgcaccgtctactgcctctacaatctcataagcatcctttagcatctttttcaatgcgatccgatccagctctgaatcgtccactatgagtaccttatctctgctgcccatactcttaccccggtttcttttattctcctggttcctatccgattcgtcctatattcctaatctgcattcgtcatcaaacgcatcataacctcacttcatcatagcaaagttgccgccacttttcaatacatcaggcaaaagaagcaggaaaaaagtcctaaccgttattgtggcttctcaatggcagcaatcgcctttttgaactggaagaaaaacagaacaagcgtaaagcttaccgcgatcacatccgctgccggctctgccagatacacgcccatggtctgatttttcaccagatgcggcagcagataaataagcggcagcagcaacacaaatttacgcataaccgccacgatgatcgatgcccctgcattgccgatcgagataaatgtcatctggcatgcaatctgcgccccgaaaatacccatggccgcgcaatagatgcggagcgcccacttcgtgtatgcgatcagctctgcgttggaagaaaaaatcattgcaaacacctgtgggaacagcatgattaaaagccatactgccatcgaatagcacaggcttgtggtcagaagcagacggaatgtctttttgacacgatccgcattccttgcgccgtaattgtagcttgtgatcggctgggcgccctgtccgagtccctgcatcggaagcatggaaaactgcatcgcactggatagaatcgtcatggctcccaccgccacgtctcccccgtatttgagcagcgaggcattgaagcagaccgtaatcacgctctcgcttgcctgcatgataaacggggcaagtccaagtgccagccccggaagtaccacgcccgcttccatgcgcagatactttttgcggatttttaatacagtcttttttcccatcaggaatgagagaacccagacggtcgataccgcctgcgagatcaccgtcgcggtcgccgctccgcggactcccataccgaatccatagatcagaaccgggtcgagcacaatattgcagcccgcgccgatcataacgctgagcattcctgtcttggcaaagccctgcgccgtgataaacgcattcatgccgagcgtcagctgcacaaagaccgttccggccgcatagattttcatataatccgaagcaaagccgatagtattctcacttgctccgaacgtcagcaacagcggtctgtaaaacagtaacagcagaaccgtgagcactgcggagatgacaatctgcagtgcaacgctgttgccgagaattttttccgcctcgtcatagtcgccctttcccatcgccatggaagccctcggtgccccgccgttgctcacaagtgcggcaaatgccgacacaatcatgataatgggcaggcagacgcccacccctgtaagtgccagcgccccatcttccggcatatgtccgatatagacccggtctaccaggttatataacaggttgatcagctgtgcaacgatcgctggaagcgacatgcgccacagcagtctcccaatcggatctctcccgagaaaatcatttttttgttccatgtcaacggttcctcccatcatctgtctgtatcaaaaaacatcttgtccaaatataattcgttgaatttcgggtgcatggcaagcgaaagttcctgcgcgtgccctgtgatagacgcaagcctctgttttgccgctgtcctgtcatcgagcagataccgctgtgctcccgcaagcgcactgttgccgatcatcgtgatatgtccacggaactgttccgggaacagtccgatccggatggcctgctcctcgtccatcctgcagccaaaacctcctgcgatcaggatttcttcggggtctcctccgccgtattccgcgagcagcgtctcgatccctgcgcggatcgccgccttgcccatctgcacctgtctcacatcctcctgccggaaccggaatctgccctccgcgaccggcatgccgtccgtaaaccagggttcctcaaacgtcccgttctcatcgatgagtccgagccgcacggcttctcccacagcgtcaataatcccggttccgcataagccgatcggtgtctcaccggcgatggtgcttagctccacggttcttattcctcctgtggcggcaggatctctctccagaaccaggtttgtcacggctcccggaacacccgcaacaccacaggatatatttccgccctcaaagactggtcccgccgctgcggaagtcacaagaaatccatccgctcctcctgctgccatctccccgttggtgccgatgtccagcagcaacacatttttttcccggtccatttccagggcatagattcccgccacgatatccgctccgacgaaagcagaaattccaggcaaaatggtcactgacacactccactggtcagacagcgcaagttctgcgccgctcccctcccagagggagagatcctccggtgtaaaaggcgccgccccaagccccgcacaggataatcctcgcagaagatgacacatggtcgtatttccgacaattacaagttcctccacagcatcatccggtatcccggcatccgccacgagtcccgcaagcaacgcatcgatatcccggctgatgctaaggcgcagtttctctgccgccccctcgtttgccgcctggatcctggacagaacatctgcgccgtatgcccgctggtgatttaccgaggatgcggcggcaatcctttttctatctgtaaggtcataaagcgttgcggcaagcgtggtggtaccgatatccacggctgcgccgcagcgctttttcccggaatgcccccatatcttggctgcgtcctctctgctgtgcatcgccacgcaatctctctgaccgtggatggtccctgccgtctgaccggggataccttcatctaccgtccgactggggatggctccgtctgccgcatccgccgtgactaacacatcgatctcctgctcccggcttacgggaagctgcaggctgcatgcctctgccacgcgcacttcacacgccaggcgcacgccactgcttcgttcttcctctgtgagcagcctccgctcatttgccgtcggttgtggtgcctccgacacaaagcgcacacggcatcttccacaggttccctttccgccgcagggcgcatccacataatgtcccgctcttatcagacgcatcagcagcgtctctgccttcccgcccgatcctgccggaagttctatcacttcttttgcatattgaacgttcatccagtcattcctccccgcgttatggcgtgtagtccacgcctgcccgcctcgcctgctcttcctgttcctcctccgcgatccggtatatccggttccctttccggaaaaaagtgccggtccgcaaaaagcggaatgtaaccccgcagttcacgcactggttcatcagttccagcacccaggcaaaatcgcatacacgcgcgtctgctccctgttcgccgccgcagagaacctgcgcaatctccccggtctttagatacgcatccagcaccagtttttcaaggagcggttcgcagagaattcccttatggcgcaccggcagttttaaaaatgcaggaatccggtcatccgcgcgtctctgaatctccaccgaacagagaatcgtcacgttttcatagccgtctccccagtcgccgggcagtgctttaaaaaagcggtgctccctctttgtctcaatcacaaaggaaagatcctgccgctccttgatcatcgcccacgcctcgctccgccattcatccgcctccggcaggaaaaaatccgacgtcatgcacacatagaccggttcctcctgtggcagcagcttgtattctcctctccgattcttctttaccggcagatcaaaattggctgtcctgcggatcacggacgcatttttgccgtacatcgcatctttttcatatacataacagatatcgcaccctgcactgattttcttgcagccatgccagggattccagaccgccatacgaaacgcgcctccttcttcttctttcctttttgtccgccggatggtatacttatcacaaatctggaaaaagtaaaaccgctgccacatccgggcagccacagaaaggaattgtctatgaaactgatctcatggaatgtcaacggtctgcgcgcctgcatgcagaaaggcttcgcagaattttttacagcaagtgatgctgatattttctgtattcaggaatccaaactgcaggagggtcagattgattttgcaccggagggctattacgcctactggaattatgcgcagaaaaagggctactccggcaccgccatttttaccagaaaggaacctctgtcggtgcattacggcatcggcattccacagcacgataccgagggacgtgtgattacgctggaattcccggatttttatatggttacctgctacacgccgaattcccagaatgaactggcacgactttcctaccgcatggagtgggaagatgcatttctctcatatctaaaaggtcttgaccagaacaagcctctgattctctgcggtgatctcaatgtcgcccacgaagagatcgaccttaagaatccgaaaaccaaccggaaaaacgccggttttaccgacgaggagcgcgccaaaatgacagttcttttatccgccggcttcaccgatacgttccgccatttttatccggataccgagggcatctactcttggtggtcctaccgctttcacgccagagagaagaatgccggatggcgtatcgactacttcatcacctcatctgcactcgatgaccgtcttgtggatgcaggaattctcaccgatgtcaccggctccgatcactgtccggtaacacttaccgtcgatctgccattctgtccatagcactatttctgccgatagacatgacaatacagcacgtcccgcatggtctcaaattcatccgccacaagccgcttcggataagacataatccgaagcgggatggcatgcctgtcctctcccatcgctggctgcatatactcaaacggattcatcacaaatccgtttctctcataaaatgcaatccgtctggcttccagttcaccggtcggcagttccacctccagtatgaccggtcttctgcactgcgctgtcagctgtgtcagaagtaccgctccaagtccgccgtttcggcatgatttcctcacagcaaaatgctccacaaacaggaatgtatcaaactcccacactgcaagaaacgccatcagttccccgtgtgcacggtacccatacaagtgataccatgagacatccagtatctttctctgcgcctccctggatcgtctctcgtcccgcggaaaactctcctccataatctcccatacgctgtcaaaatcccgttctgtcagtgtctctaaactctgcatgttctctctcccggctgattctttcttacttacttttataccataaaacaagattatagcacaaatttcctatggaatcaaaccgcgctgttctttgcctgcgtctcaccctctccgatcctgatggtgcggaagccctctccgtgcacttcattggactctaatataatcataaaggatgccgggtctgcctccttgatggcatgctgcagcagatacatctctttgttgttgcacacgcacatcacaatctgtttgttgtcacagcggtaaccgccctgtccctgtaatatcgtagagccgcggccgcagcaggaatcgatcacatcgcagatctcctttccatgctccgtcacgacaagtgtcatctttccggaattgatgccgtacatcagcttgtcgaccacgattgccagcagaaaacttacaatcattccgtagataattccatccacatcccgaagcagaaatccacccagaagaatgatgatcacatccgtcacgaacgaaattttcccgacagaccagtacggcttcagattcttgaccgccataataataaagtcggaaccgccggtcgaggaattctgcatgtaaatcaccgcatatcccagtccggcaaacacaccggtacagagtgccgcaagcagacggtctcccgagtaaaccgggaacagtggcgcgacatagtcaatcatcagggaagaaatcagcatacagcgcagtgagctgaagaaaaagtgtcttcccagcagacgatagcacaatattgccaccggtatattcagcagtatcgtggaaaatccgatcggcacgccgaacagctggtataaaatgatcgagatacctgaaaatccggtcatcgggaatcccgcctgcaccgcaaaattgtaaataccgccagcgataaacgcacttcccacaacctcccagaatatctgttttaaaaatatctctctatcttcttttttcattttcattcatccttcctttgcatgcgagtgtctccacaacacaaaaaaagagcaccagcagattatacgaatataatatgctaacgctcttttccgtattctattgtaacaccggaatccggaatttgtcaaatatgtttctctttacaatccggatgtgtcgtgttaatatgcttcatatatgaaccattcatatgtgaagtattcgtacatgaagtatatgtatgcgagacctttccatatatatattgcatacgtgaagtattattttatcccattgaaaggagcatttacttatgaataccggtattgaaattaccatgaagctatcggctgcctacagtgctgtatgcagacctttgtgccacgaactgaatctcccgcagaccgcgttcgatattctgatgtttctggcgaacaacccggaatataccaccgcacgcgatattgtggaagtccgcaagatcaaagccaacctcgtatcgatcaacgtagacaagctcgtcggtgaagattatctgcgacgtgaggcggacacagacgaccgcaggaagacccatctgctctgcacagacaaagccggcgctgtcatcgaacaggggcgcacccttcagaaccgctttatgaacagtcttctggcgcacatcgacgacgctgccagaaagcagctcgcagaaagtattcaccagatggagcagaatctggatcacatgttagaggaggaacactgatatgacattattattcacgatactcgtcaccttttttgccggcatgggcgccggactcggcaccggcttcgccggaatgagcgcagccgccgtcatcagcccgatgttaatcacttttctggatgttgacccctatatggcagtcggcatcgccctctcctccgacgtgcttgcaagcgccgtctccgcctacgtctatggtaaaaacaaaaatctggatatccgcaacggagtgattatgatggtgagcgtcttaatcttcaccgtcatcggaagctacatctcaagccttgtcccgtccaccaccatggggaatttttccgtcttcatgacgtttcttctcggcatcaagttcatcgtaaaacctgtcatgacgacaaaagaatccatggcgcaggtctccgcaaaaaaacgtgccgtccagtcggttgtctgcggcgtgatcatcggatttatctgcggtttcatcggtgccggaggcggcatgatgatgctcttaattttaacctctgtgctgggctatgagttaaaaactgcggttggcacgagcgtatttatcatgactttcaccgctctcaccggagccgtgtcgcactttgccatcggcggcgctcccgactggacaatctttcttctgtgcgtggtgttcacgttcctctgggcgagaatcgcatccgtattcgccaataaggccacaccaaagacgttaaaccgtgcaaccggtgtcattcttgtagtccttggcatcgtcgtgctggcgttttccttgttgtaaaatctgtaaaatagcagataaccagaatatgcttacaaatatgccgaccggacgctggcagcttcccaccgccgccagcgcccggttccccgcaaatctcccggtcacagccatacctgcctgacatctttaaattcggtgccgatcatccagtctctcacaattcttggaattctccatgcataggccggtgtaacaacaagaagatatcgtcctgcagggcattataaaacctgagacgtacaaatacaagagtgcgcaacgccagcttttgtacaatccataatcattttctcacacatctcataccccagcctggagctgttcatagacagtgtataattgcccgccattccccatttctgctccgtgtaaaaacgataatttgtcatacgtcttttatcaatatccgccatcatttttactgcttcggcttcggtgacatggtacagcctgcagatgcgctgcactttttccggcatatcgccgtgtataaatacattcagcacatcctctctgtccttcaaaataaaatctgcatttcttcctataatgacgcagctctccttttctgcaatctccagaatcacctttctctgcgcttcgtacaccatatcttccacggattttccggtaaggtcgcgtccggcaaaagcatagccaaacaaacccttctttggagagagttccgcattttcctttatgtactccgtagaaaatcctgacttctctgcaatctgaccgatgatatccttatcgtaataggcaattccaagcttctttgccacttcttcgccgataaaacgaccgccgcttccgaattctctgctgattgtaatgattctttttgccatctcaattcctccctaacttaaacgctccactttattttttctgattccctttaaaaatacatagcccaccagacacgctatcatctccgtgatcggaaatgcccaccagatcagtgagatgcccatctgaccatttcttgcaaagattgaaaaaattcctgccagcggcaatatgatgacaagctgtctgagcagcgaaatcaccagtgactcgatacctccgtccaaagcctgataaatgccctgatatgccacattgattccggcaaagataaagctgatggagataatccgcatcgctccaataaaatattctctggattgcccggcattaaacagtgtcgcaaatgctcccgggaacacttccgtgataatgataccaaaaatcatcagcgccgttgtatacaggagaccgtattttattccgtccttgattctctttttgcttcccattccataagcaaaagcaataatgggtgtaattgcatctctgagtccgaatgctaagaacaacacaaactgctggactttatagaacagtccgtatgcggtctgtgcagaagggctgaacttcagaatcaggttcatcacataaaccatgatcgacatcagcgcctgcgcaatgattgccggaagtccgatcgcatagatttctcttatgataccggcatccggcttcatgtactccactccatgctcaaattcctgattcaatttcatatggaacataaacagcaataccgcggatgccacctgaccgatcaccgtcgcataggctgcgccttccactcccatttcaggaaccggtccgataccatagatcataaccggatcaagaatgatattgaccacggctcccacaacctgaccgatggtcgaatatagagaacgtccggttgcctgcaataacttttcaaataaagaaaagaagataattccaaaggaaatcacgcagcatattctaagatagcttgttcccatcgaaattacttccggatcaaccgtctgtgaggaaatatatgccttcactccggcaattccaaacaacagacatactgcataaatgattcctccgaggaataaactgttgcctgcaaccttcgctgccttttttgtatttccctgcccgagtgtccttgccagaagtgcatttgttcccacacccgttccgattccaactgccaccataagcatttgaaccgggaacaccagcgtaagtgcatttaatgccgcctcactccccactttcatgtttccgacaaaggcgctgtccacaatattgtagaccgcctgcaatgccatggataagatcatcggtattcccatctgcaccataagcttctttaccggcatttccttcatcttgttactctctgtcatataatcctccttgtttttccgcacaaaaaaaatgtgtacctatctcataagctggacttacgctgataagctacacacttctttatggcatgatatttattttaaaaacagaaaaacgagtagcaaaactggatttacgctagtctgctactcgtttgatccttattatatttctcattttagaaaaagtcaatatagcaaaagcgcaaaaggacagccacacacatacatgtgtgactgtccttttccctatctatacattaccttctcctaaaaataacgcatatgatttatttgtttgcgattgctgcctgtgctgctgcaagacgagcgatcggcacacggaacggtgagcaggatacataatccagaccgatcttgtggcagaactctacggaagaaggatctccaccgtgctctccacagatacctacatgaagcttcggatttaccggcttgccaagcttgattgccatatccatcagcttgccaacacctgtctgatccagttttgcaaacggatcgttctcgaagatcttggtatcatagtaagcatttaagaacttacctgcatcatcacgagagaaaccgaatgtcatctgtgtcaggtcgtttgtaccgaagcagaagaaatcagcctctgttgcgatctcgtctgcagtcagagctgctctcgggatctcgatcattgttcctacttcatactcaagctttacacctgctgctgcaatctcagcgtcagcagtatcaacaacaaccttcttcacatactttaactcttttacttcgcatacaagcggaatcatgatctccggctttacagtccagtccggatgagccttctgtacgttgattgctgcacggataacagcctttgtctgcatctttgcaatctccggataggtaactgcaagacggcatcctctgtgacccatcatcgggttgaactcatgcagagaagcgatgatgttcttgattgtctcaacagacttgccctgagcttttgcaagcttctcgatgtcagcttcctctgtcggaacgaactcatgaagaggcggatccaggaaacgaatggttaccgggcagccttccagtgcttcgtataacttctcaaagtcaccctgctgatacggaagaatcttatcaagggcagcttctctctcctctacggtatcagagcagatcatctcacggaatgcagcaattctgtcttcctcgaagaacatatgctctgtacggcaaagtccgataccctcagcgccaagctcacgagctttcttagcgtctgccggtgtatctgcattggtacgaacctttaatgttctgtacttgtcagcccatgccataacacgtccgaactcgcctgcgatggtagcgtcaacagtcttgatctcgccatcatagatattaccggttgtaccgtcgatggagatccagtctccctcatggaactctttgccggccagtgtaaacttcttattctcctcgtccatagcgatgtcgccgcatccggatacacagcaggtacccataccacgtgcaactacggcagcgtgagatgtcataccgccacgaacggttaagataccctgggaagccttcataccagtgatatcctccggagatgtctcaagacgtactaatacgaccttctctcctcttgcattccaagcctctgcatcctctgcagtgaatacgatcttaccgcaggcagcaccaggagatgctccaagacctttgcccatcggtgtagcagcctttaatgcagcagcatcgaactgcggatgaagcagtgtatcgaggttacgcgggtcgatcatcaatactgcctcttcctctgtcttgtgtccctcatctacgaggtcgcaagcgatctttaatgcagccggagctgttctcttaccgttacggcactgtaacatgtagagcttcttgttctctactgtgaactccatatcctgcatatcatggtaatggttctcaagagtctcgcaaacctttaagaactcagcgtatgcctccgggaactcctgctccatctgagcgatcggcataggtgtacggacacctgcaacaacgtcctcgccctgtgcattgattaagaactcacccataagcttgttctcaccggttgccggatcacgggtgaatgcaacacctgtaccagactcgttgtttaagttaccgaataccataggcattacgttaactgcagtaccccaggaatacgggatatcgttgtcacgacggtatacgtttgcacgcgggttgtcccaagaacggaatacagcctcgattgcaagctttaactgctctacaggatctgacgggaaatcagttcccagctgattcttgtactcagccttgaactgctctgccagagtctttaagtcagcagcggtgaggtcgatgtcgtactgaacacccttctcctctttcatcttatcgatgagctgctcaaaatacttcttaccaacttccataacgacgtcagagaacatctgaatgaaacgtctgtaggaatcatatacgaaacgctcgaatgccggatccgggtttcctgcgatcattgctgctactacgtcatcatttaatccaaggtttaagatggtgtccatcatacccggcatggaagctctcgcaccggaacgtaccgataccagtaacggattcttcagatcaccgaatttcttaccgttgatctcctccatcttcttaacgccttccatagcctgcgccatgatctcgtcgttgatcttacgtccatcctcgtagtactgcgtacaagcctctgttgtgattgtgaatccctgtggtacaggaagtccgatgcttgtcatctctgcaaggttggcacccttaccaccgagcagattacgcatggtcatgtcgccttcgctaaacatataaacccatttgttcgccattttgctaattcctcctaaactatacttactatgtaactatgtcagagccaacccctgccataattccgcaaacgaatgtacgtctcccaaaacgcacacatctataatatcatacttttgctaaatagcaacaattattttcgtctctttttgctgttttttgtcacaatttcacaattcaaaaccttgttccatgatgtggaacatttctacaataagtctgtgcgctaaaatgaaagaccagacaaaaagagactggtctgcttttattcacccagtctcttttccccacacaaaaatatatttttataaatttaattatgcaattttctttctgtttactactacaagtgcacctgcgcatgcaagtacgatcattgccataccggcaactccgttatctgcggtcttcggagatgttcctgctgcagtgttggaacttgttgcaacgtactggtcattagaaccgtctgtagaaccaggtgttgtcgtatttccattagaagccgttgccgtacggacaattaccatgttagaaaaagaagtgaactttgcggttactgtgccgtttgctgcagttgcatcctcaacataccagttgccatctgcatgcttatggaaaatgcatacgctgtcaccagcatttacggaagcattaaatgtaacggtaaccggactgctctcagaagcgccatctgcatgatagtcgcctgcacccataatatctacattgcttccgaattttgctgctactgctgctctggctgctgctgcctcacctgcggtaagctgtcttactgcaagatttactgcattaccgtttgcgtctgtagctgttgctgtcactgcactgtagtttcttatgtatgtaacacttccaactgtctctgtcggtaatgttgtgttgtttgttacactcggtgctgcaaatgcagtaacactcatagctaaggcgagaaccatagctgctactgttgtgaaaatcttcttcattggactcattcttcccttctgtgtattattttgtgtggtcttttctatatcaacgcgtttgcgtcaatatcattctcatgcatcctccgctgtataaaacagttccagcatcaactcataaaacgcctgttcatctatatgaaactcttcatagtattgtccctgcacctgttctccgggaattacaagaagatcctcttctgtaaagtcacagttcaatcccagcattaccagcgacatcatctgtgccttcgacaaatccatcagcatggaatccgagatactgttatacatgcgaaacggagttctcatatcctgtttcgttgcagtcatcgctttttcaataaatgcaaccagatactgcttctgtctctgcaggcggtattgtgcactgtaagcctcctcgcagtcccgccaccggataaaatgatatgcctgctcattgttcagcgtaacagtgtctcccgccttaaaatcatcaaaatcctgttggatttcaacagtcactccgccaaccataccattgagattttcaattgaattcaagctaaatgccacataagcatccaccgggaaatcataaaaaagcctcgacaccgcccgctccatcaacttgcaactctctatcccgccatttccaaaagcatactgcaatgccagatggtctctaagcagccctagcggttcccctgtcatataaaaagtttccagatctgtcatggtgtctcttgggatcgccaccagtcttattttcttttgttttttatcaataattgccagaaaatttgcatccgactgcgcccctgagccactcgcgccccctgcttctgacatatcattttccgtatcaagccccatacacaataccgtatagatgtcacggttgcgcacataggtcttcccctgataagaaatcttatcatcaagtgtgcgttcgtcatttgaatagccggaatcacttccctgtactgcctgtaactttaagctgtgcagaccataataatatccgccagccacacccgcgacagccgcaagagcaagcacgccaagcacgattattccccaccgaaaccaccttttattcacattaccgtctggcttattcccgttatctctcgctctcattaacaagtactgcctccaccagcaaacgtttttcactctcattcttaatgcatgtcgataatgtaagcagtctgtcgttttctgttgcctctacatcttcgcggaaataatcattatctccatcattttttctcagggaatccagatatgcttcccttccataagcttctgtaaacgaaaaactctgtaaaatgtgcctgtcatcatactccaccgctgcaaacacctgataaatgagctcttcctccggtgtcaccacgtagacatactggtgttccttcatgtatgcagcatccagatactgatgcagcgaaccgaacatggtgccgtttttcatatggtgtccatataccaccacattataatccgtaaaatcggctcgattgcagggctgtatataaatagaagccggcaatccgctctgtccgcttaccgtgtgctgtaaataataatcgtcatattgattctctgcatcctgcttgcgcaaaatcggataattcacctcagaatccggaatataaagccatgcacagatatctgtattcgtctcccagagtgtatcaaaatccacctccggcaccgtatcatagatttctgcgtcaatctccatcggactctctgtattctctgtcggaataacgacactttcctgctgtatctcctcgtactgcttctgtgccatccgctccctgataaaatggctgatcatatatatcagacaactaatcaaaaccacaaccagtgcaacttttattatcatccatctttcttcccgtattttttttgactgccgttcctcttttttcatatcttttgtcccctgtcacaaacttactataattgtacccccccccccccaagatttattgtcaatatattttttcccatatataggaagaagtttttaagattttttatttatatttaataaatttcatccaaaaatatccgtggacatcatccacggataagaaacagaacataaaaaatacctccaaaatagacaagtcaaatccctaaatctactttggaggtactattaatttataaaaaatccacgttgcagaaaatcaaacagatacgttgcctgtttcaagaaatctctagccccgaagctgtcgagctttgcgatccagaggatcgacacgacaaagatccagggatgcttcttcatcctgccgcacatattctcacacgcgtaaaccatcgccggctctcccttcgccgcatagaacagaaacataaaaatctgcatggcaaagagcggtgcaaaatgtctgccccagtccgtgtggatcacgaacatcggcacaaaacacagctggcttagcagcatgtaaaaatacggcgatgcataccacttcacattgctctttttctgccagccaaagacatcccggtaaatctgaaaacaccacacaagcaccggcagcaacaacagaagaaccaacagcgcatgccggatcggcgcatcatatttgtaaaactggggtgtaatctccttcaactggtaatccattttcagaaaatactcaatatcaagcgcatattccgaaatggtgaggttcgttctcccctccaggaatgtgacaagctccttcgcgctgtcaaaattgatactgctgaaaaactgaaaatataccgctaccgccacattgataagaccggatacaaacgcagcggcaaacctgccggcatgcaccctgttttcctcaaacacgtcatataccatcacggaaaagacaatcggataatacaaaaatgcaaatccctggtgaatggcaagtcccacgacgccaagcagcgtatagcagacacactttacatatgtattcttaatcgcaagaccgacaagcagtgccagcagtgcaaccaacaacatgtagacatccagtctgcctaaattctgatcgttccacacataggcaatcgaaaacggcgcgacaaggtacagcgccaccgccccaagaacggcgtgccggatctgatcgttcttagcgacggcaaggcggatcattctccccagcacaatggcaagcaccagtatcgtaagcatcgttccgacggcgacgtatttgtatgccaccgtgtaatccagatactctccgtaaaacaggcggtaaatgcttccgatgagaagccttgatcccgttcccatggaatagtccatcgcattccatgccgacgaccagccctgcaggtctaacgccctgcccgtcagaaaccagacggtcagaccggctgcaatcacaacctcatacgatacggcattccataacttttttatcttctccatctgcctaccacgcaaacttctgtgcaaagtaagcatccagttcctcgatcttgatacgctcctgctccatcgtatcacggtcacgcacggtcaccgcaccgtcgttctcagactcaaaatcgtatgttacgcagaacggagtcccaatctcatcctgtcttctgtatctcttaccgatattgcctctgtcatcgaattcacagttatatttcttggagagctgtgcaaaaatcttctctgcgccctcgtttaacttcttggaaagcggaagcactccgatcttaaccggagccagtgcaggatggaaatgaagcacagttctcatatccggcttctcctcggtaccgatgttctcctcatcgtaagccgcgcataagaacgcaagcaccacgcggtctgcgccgagagacggctcgatgacgtacggcagataacgctcgttcttctcgtcgtcaaagtaggtaagatcctgaccggacgtctcctgatgtctgccgaggtcgtagtcggtacggtctgcgataccccagagttcgccccagccaaacgggaataagaactcgatatccgttgttcccttgctgtaaaatgcaagttctgccggatcgtgatcacgcagacgcatctcgtcctccttgatgccgagggagatcagccagtcacggcagaaacctctccagtactggaaccactccagatcggttcccggctcgcagaagaactccagctccatctgctcgaactcacgggtacggaacgtaaagttacccggtgtgatctcgttacggaaagactttccgacctgaccgattccaaacggaatcttcttgcgggatgttctctggacattcttgaagtttacaaaaataccctgtgctgtctccggtcttaaataaaccgtattctttgcatcctcggtcacgccctggaatgtcttaaacatcaggttgaactggcggatgtctgtaaaattgtgcttgccgcagctcgggcacggaacctggttctcctcgatgaaattcttcatctcctcctgggtccatccgtccacggagctctgtaaggtgatgcccttctcctccgcgtagtcttcgataatcttatccgcacggaaacgctcatggcactctttgcagtccatcagcggatcagagaaaccgccgagatgtccggaagccacccatgtctgcggattcatcaggatcgcacagtccacaccgacattgtacggattctcctggataaacttctgccaccacgctctcttgacgttattcttcagttcaacgcccagattaccgtagtcccatgtatttgcaagtccgccgtaaatctccgatcccggatatacgaaacctcttgattttgccagcgccacgattttgtccattgatttttccattctaaattcctcgcctttcttaggttatattgtgatatgtttatttgtaaacaatgaaagtatatacgtctgtctcgaacgaaccgtcaccggccgacgcctctgtctgctcggtatcatccgcattcaccggctccccggtcatctccatctgttcggtccccgaaagctgctcggtcccgacgctctcctgtccggtcacatccacggatgccgtcacgcttcccgtctcaagataatatccgtcacggatcgacacactgtcttttccggtcagcttcacattctgacaggaaacatagcagatctcaccgtccaccttcacatccgtattggcacggatgatggcaactttcaaatcatcctcagagtaaatatcctgttttgtggcagctcccacaaccttgccttcctccacgcgggcgaactccccgtcgtagacgtatcctgccgccagggaagcaacgactttcccctgatagagttcaattccattaaatgcggtataatcctccggtgtcttgtacttcatcttaagcttcgccacaccgtcttccaccttaaggctctccacctcgactgcatttttgccatgctccgcggtgtaatcttccacctctgcatccacataggacttcagttccgtctcatcgtagtaggactgatcgagcgactccacatccagcgactctatcacgcctttctttcccacgtacacgacactttcctctccctccagcgaggtaccgcatccggagagaagtcccacacacaacagtacactgcagaccgtgcacactaatctcttcatcacataatctccattctttctgaaaaagtatcggtgatattatactattttaaaaacatgatttcaaccttttccgcatcctcaagtatctttaacgacttgaaggcgtgtcccacgtacacgccaaaatagctgcgcaaaagtctggtcagttcttccagcacctgcccgctcacggaaaacgtatataatttttcaatccgcgccaagatcacgtactgcatggtatagacggtggattcattcaattccaccgcatctggcgcctcattgcggcattctgcacagagaatcccgccgcgcttgacggaaaaccaggtcagatgctccctgctgccgcaggaaagacaggaaaacacattcggagcctcgccgtttaccgccagcgccttcagttcaaacaccacgcgcaccagccggttgtcgtaggcactgctcgcaagggcgcgcagcgactggtacaaaagctttagcatctcgcgctcatcgttattttcctgacaataataatccgcaaattccagaaaatagaacccgtaatatgtagcatcaaaatccccggtcagctcccggaaatagttctgaatcgtcgctctggcaagcgtgtaagcacttcttccctcgaacagctcgaactctccgaagcaaaacggattggcagctgcgagaagctggctgttcggccgcctcgctccccgcgcaaatgctgtgatcttccctctttcttttgtcagcagtgtaatccgcttgtcatattcgccaatcggcattacctgtaagaccatcccggtcaccacaatattgtttcccatccggctgctcttcccccgccaaaatattactgctctcctgcacatccactgcattccggtagcgcaggtaatcagtcactcttcctgatactaaaaagtctctccaggcttcctccatcggcatatcctccgtttctttgacgcttcccgcctctaagattaggttctccgatggctccgccattataccagcaaaaaattggcagtatcagatatcgtctttattgtacccgaagttcttcatcatcagttcgctgtcgcgccagtccttgcgcaccttcacccacagttttaagttcacctgcgtatccaaaagccgctccatctcgtagcgggcgttcgatccgatcttttttaacatcgaaccgccttttccgatgatgatgcccttgtgggaatcgcgctcacagacgatcgttgcatcgatgtcgatgatgttctgccctctccgctccttcatccggtcaatgtagaccgcgatgccgtgcgggatctcatcatccagagcatgaagcgccttctcacggataatctccgcgacaatggcgcgttccggctggtctgtaaccgtctcctcgtcatagaacatcggtccgtacggcaggtacttgaaaatcacgtccacaaccgtatccagattctgttcccggagcgccgatgccggaacgatctctgcaaaatcaaacaccttgcggtaagcatcgatatactccaggatcttttcccgctccacggtatccaccttgttgataattaagatgaccggcgttttcgtcttctttagctgctttatgatatgctgctcgcctgccccgataaacgtggacggctccaccagccagagaatgacatccacctccgaaagcgtgtgctccgccacattcaccatatactctccaagcttattcttcgcctgatgaatgcccggcgtatccaaaaacacaatctgtccgcgctccatatccgtatacacggtctgaatgcggtttctggtcgtctgcggcttgttcgacgtgatggcaatcttctgaccgatcagatgattcatcagcgtcgattttcccacattcggtcttcctataatcgtcacaaatccggatttaaaattatctttcatcgttctcctcgtttctgtactgttttccccgccccgcatcaggtcaggctctcaagtgtctcaaacatctgtttttccgatgtcagcacatcttcattgccgatcacacacaggctgccgtctgagagcaccgacgcaatcaaaggcttcaatgcgcggatgtccgccggctgtgccccgataatctggctccgctcctttgaaagcgtctcgtagtccagctcctgcagataggctgtcatcgaacgcgcacccttcgcgctcgggttcatcggcgtgtccatatcgctgatcgttccgatgatatatcctgtcatctcgcgctcatcggcatcaaacttctcaaggtacgccggaatgccgtcataaatctcattcgttgcagagagattcggatcccggtaggacacaaaatacgtatctccgttcctcatatatccgttcatgcagccataagcgccgcccttgacgcggacattgatccacaggtaatcgtatcctaaaattacttttaagatgcggagcgccccgtgataggaaaagccgtgtgcggcataatttccggcacgcgccacatactgcacctgggatgcatccataaatccctcgttcttttttgccagcggataggacggcatagagcgattcttacccggctgatccggcacatacaatacatttttcaatgcagccgacgcctgcgtcaccgccgggatctccgactcctcgcaggttgcactcaccagcatacgctccgctataaaaatggttttcacaagggagaacagcttctccatcagctgctgctttttctcctcaaaatgctcctcgtaatccgcgatcacacggtagcaggcaatgcccgccgtcgcgtcctggcagtaggcagccgccgaaaaatacgacagcgctctcgtatatgccacggaatgtccggaagcgctcagtcccgcctgtaatctcgactttaactgtgccagtatctcatagagcctcttctcatccgacagatgcgaggtcagaaggatctccttaatcaagcgcattgcatccggcagtctcgatgcgagcactttcgtgcgcacctcatagtaaagtccgatttcgccctgctttttgacgttcgggtagatgccgatgctgctgccgattcctccggtgtacatattgatctcattggcaagcgccgcgtaggaatgattgtccgtatccacatatcccagcactgcctttaagataccgagataaggcagatcttccggcagaatatcgcacacatcaaacagataggtcaggtaatcgataccattcgtgtccatctcatgcgcaacgatggaaacgccctccgtctcaatctcacggttaagaagcggcgccgcctcttttttcagatccgctctcgtaaggcgtggaatcttctctaagtcttccttcggcgacggctcttcctgatactgctttaagtgcttcgtgtctgcgatcagcttctttcgctcttccctggacaatcccgctttgtattcggccagcttcttctccagcgcggcatctctctttgcgcccagcccctgctccggcaccgtaatcacaaccgacgcatgcggattgtccagcagataagtctttaccagctcctcataatatccggttccgatctgatccttcaaaaactgataggtgtccaacgcttccagatgcataaacggctgcatatcatcgaacagccagctgtccagacactggattccgtagagcagtcccttcgggaactgtccgaaatccgcctcccggaaacggaattccgagctgttgattccggctaacaatgcgttttgatcaattccgtctgccacctgtgcctgcagcgtctcacggatcacctgcaaaaactgctccttctgctccggattcgcattttttgcaatcacagaaaataccggctgcagcgtgctgttatcatagccgccgccgatgtccataccgattcccgcatcaatcagcgcctgcttaagcggcgctcccggcgcggaaagcagtgcgtagtccaaaacgtcaaacgcctggtataactttttgtccagaacagttccaaccaccacattgtaagacagatagctgttgtccgtaagcgtctctcccgacgccaccggataaggctttacgatctccaccggcgcggcaaacggcttctgcatccggattgcggaatccagctcgatctgctcgtattttccgaggtattcctcatccatccagcgcagcttttctacaacgtccatatccccgtacagatagatataggaattgcacggatgataatactttctgtggaagtccaggtactgctcataggtaagctccggaatatgctccggatcgccgccggactcgtttgcgtaagaggtatccgggaacagtgaatttaaaatcaggcgctccaacacatcatccggggacgagaatgcgcccttcatctcgttgtacaccacaccgttgatcgttaccggcgcatcttcatcctccagctcgtaatgccagccttcctgctcaaagatctctctgtgcttgtagatgtccggatgaaacaccgcatccatatagacactcatcaggttctgaaaatccgcattgttgcagctcgccaccggatagatggtcttctccgggtacgtgatcgcatttaaaaatgtgttgagcgatcccttgaccagttccacgaacggatccttgaccggatatttgtccgatccgcagagcactgtgtgctcaatgatgtgcggcacaccggtcgaatcctccggcggtgtgcggaagccgatgtaaaacaccttgttctcatcgtcgttggagatcacggtgattctcgccccgctctttttatggcgcagaatatatcccatcgaatggatatcctttaactcctgctcaccaagcagctcatatgctgtcaattctgaaagcttcataaatccataattcctttcctgcccggtcatcctgtatgtccggtatttacactgtgttctattataacagcttttcccattctgcaaaagagtaaactatctatagattttgtctggaacactctgcgaacggtgccggcaaagtaccacatgaaagttcctgaaattgtccctgatttgctgggcacctgccagattgtccaaacgcaaaaaagaggctgcctgaatgcggcagcctcctcccatgtcttcacagatatattctactgataagaactccctatgcgatgcgtgtcacattcgctgcctgcggtccctttgcaccctcagtcacctcgaactcgaccttctcgccgtcctttaactccttgaatccatccatattcagtgcggaaaaatgtacgaatacatcgttgccctctgcatctgaaatgaagccatagcccttcttggcattaaaccactttacagtaccctgctgcataattctaaaaaccctcctcaatacagttctgacattacagactattcctgtctgtataaaacaacaaattgaaattagcacattttactttttttgtcaatctttttctgtcattattgtttaatttgcacatcaatctgctggtatgggatagaaattcccttcgcatccagcgcatacttgatattttccgtcatgcgccagcgcgccggccagtaatcctcggtcttaacccagaccctgagtccgatgtccaccgaagatgccgccaggttgtccacatataccacaggcttctcctccgggattctggcttcctccttctccgccaccgcatagatcacatctttggcagtgcggatatccgcttcataggcgatgcccaccacgagatccacacgccgtctgtctttgtttgtcacgttggtaagactgctgttggaaagcgtaccgttcggtatcacaatcagcttgttgtccacggtaagcagtttggtataaaaaatagagatctccgtgaccgttccctcattattgtgggaatgttcaatgatgtaatccccgaccttgaacggctttaacagcaaaatcagcacgccgccggcgaaattcgacaggcttccctgcagcgccagaccgaccgccacacctgccgatccaagcaccgccaccgcagacgtcgtcgcaattccaaacaatcccataatgataaaaatcagcaccacatacagtgaatatttgatcaccggtatcatgaactgcttgacgccctcgtcggttcccgcccggtccatcgagcgccgcaccagctttgtgatccacttgatgatcttgcctccgatcacatacacaagcagtgcgatcagaacctggaatgcgaagtttaacagatccggcaccagcccttccagccatgtacggataattcccggattctttgcaacctcctcaattccctcctgtgcatggttcaatgcctccacggtctccgtggtcgacgggaatgcatctgtctgtgccgccagataccttccctgctccaaaagtgccgctatcccgttcactctctcgtcctccatccaactttataatctttcttaaatttcatgaataaacagaccgctccttagcttcggctcgaaccaggttgatttcggcggcatcaaaagtcccgcatccgccactgcgaacagctccgcaatggacgtcggatacattgcaaacgccaccgcgcagtcctgctcacagcgccgcaccagttcgtccatgccccggattccaccgacgaaatcaatgcgtccgtccgtcttcggatctctgatgccgagcaccggttcaagaagcttattctgcagtatggaaacatccagatctgcaaccggatcttccggcgtgcggtcctcctgccggatatggcaggaaaaccagtgtccttccatatacatgcaaaaggttccccgctccttaggtctggtatcctctgccccggtaatctcctccacatcaaaccgcttctcaacttcacggtacaatcccttaaaagaatatccgttcagatcgcggaccacacggttgtagtccataatcatgagttcatcgtccggaaatagtaccgagagaaaatagttaaactcctcctccccggtgtaacccggatgttccttccggcgcttctgccctacttttaccgcggacgctgccctgtggtgtccgtctgcaatgtagatgctgtcaatgcccgcaaacgcttcatggatcgcagcaatatccgcatcctcgcgaatgacaaacacccggtgtctcacgccgtcctccgatgtgaaatcatattccggctctccccgcttcgtcttttccacgatacgccggatcccgtcattcgcgcggtacgccaaaaagatcggtccggtctgtgcgttacagacatccacatggcggatgcggtcgacctccttctccgcacgggtattctcgtgctttttaatgaccccgttctcataatcatcgatggacgcgcaggctgccactcccgtctgtactcttccattcatggtgagttcgtagaggtaatagcactttttgtcctccgtcagaaacgtgccgtcctccacccattgccagagtgtgtcatgcgcccgttcatacaccttgtcatcgtacatatccaccgacagcgggaactgcgtctccgcgcggtcgatgctaaggaaggactgcggatgccgctccacttccttcgtagcttcctctctgttataaacatcataagggagggcagcaatctctgctgccttccctctctgtggtctgatgcttacaaatggtctgatttctgccattgttctcacacctcgttattttactttccgtacttttaataccccatccgtctgctccagctttgcgagcacatcatccggcacattcgtatccacatcgatcagcgcatatgcatagtcgcccctggacttgttcgccatgccgtcgatattgattccggcattgccgagaattgttgtaaaatggctcagcataccgctctcgttcttgtgcagaataccgattcttcctgccgtcatgcaagcgcccatgctgcagtccgggaagttgaccgaatgtacgatattgccgttctcaaggtaatcgcggatctcgcgcactgccatgagcgcacagttgtcctcggactctgccgtggatgcgcccagatgtggtgtcacgatgcagccctttgcaccgactgtcgtggtgttcgggaaatcggagacatattttttgatcttgcccgctgcaagtgcgtccaccatcgcctcctcatccacgagaagatctctcgcaaagttgagcacgatcgccgtcggcttcatcattgcaatcgcatccgcgccaatcatctttctggtggaatccaaaagcggcacatgaatcgtgatatagtcgcactcgcggtaaatgtcctccacgttgctgatgtgcttcacgctccgggaaaggctccacgctgcactgacggaaatatacggatcatagccgtacacttccattcccatgtgggtcgccgcattggcaaccagaacaccgattgcaccaagtccgataacacctaacttcttgccggaaatctcggttcctgcaaaatttttcttctgcttttcagcagttttggcaatattctcgtcgttctgattcgccagacaccagtcgatgccgcccacgatatcacgggacgcgtagagcattcccgcaaacaccagctccttgacaccgtttgcattggcgcccggggtgttgaatacgacaattcccttctccgcgcatttatccagaggaatgttgttcacgccggcaccggctctcgccactgccgcaagtccctccgggagttccaggtcatgcattgcggcgcttctcacaagcactgcctccgcatcctttaagtcttccaccttctgataatcatccgaaaacagatccagaccgaccgctgcgatcggatttaagcaatgatacttatgcatttgcattctcctcctcgaactttttcataaacgcaaccagcttctccacgccctctttcggcattgcattgtagatggaagcgcgcatgccgcccacggtgcggtggccctttaaattcacaaagcctgcggctgtcgcttcttttacaaactttgcatccagctcttcgttgcctgtcacaaacggcacattcatgagggagcggtcctccggaacaacggttccgtggaacagtttgctctgatccaggaaatcataaaggatcttcgccttttcctcattgcgctccttcatcacggaaagaccgcccatcttctttaaccacttgaataccttgccgcagatatagatgccgtagcacggcggtgtgttgtataaagaatccgcatcggcgtgtgtcttgtattttaacatggttggtgttcccggaagggtatcttccgtgatcagatcctcgcggatgatgacaatgacaactcccgccggtcctacgttcttctgcacgccgccgtagatcacaccgtattttgtcacatccaccggctcggacaaaaagcaggaggatacgtccgctaccagcgtgtgtcccttggtattcggaagcttcttgtattttgttccgtagatcgtattattctcgcagatgtacacataatccagatcttccgggatatccaggtcagaacaatccggaatataagaaaacgtcttatcctcggaggatgcaagctttactgcctcgccgtaaatctgtgcttcctgataagctttcttcgcccactggcctgtgacgatatagcctgccttgcggttcttcatcaggttcatcgggatcatggcaaactgctgggatgccccaccctgtaaaaacaggactttgtaattgtccggaatgttcatcagatctctcagatcctgctctgcctctttgatgatgttgtcatacaccttggagcggtggctcatctccatcacagacattccgcttcctctgtaatccagcatctcatctgctgcttcttttaagacctcttccggcagcactgccggacctgctgaaaaattgtacactctgctcattttctaattcctttcctttctcttttattacggcagttccctacgctgccgcctccatgccccctgtaacaaaacatatacacatgttatgactgcactgcgactaaatcctccccggtaaacgcggtactgatatccgcccccggagcaaccatcggccataccttgtcatcgcagccgatcacacaatcgatcactaccggcgtctttgcagcaagcgctgcttttaacgcctcattaaatgcctcgcgggttgtggcgcggtaacctgtcgcccccatcgcctccgcaagcttcacatagtcgacgccgtcgtctaaaaccgtcgccgaataacgtttttcgtaaaacagatcctgccactgccgcaccatgccgagcacatgattgttcacaatcacttcgatcagcggcagtttctgccggactgcggttgcaatctcgttcatattcatgcggaaacatccgtcccccgcgatattgatcacctgttttcccggatttgcaacctgtgcaccgatcgcagcgccaagtccgtatcccatggtgccaagtccgccggatgataaaaatgtgcgcggatttttatatttataatactgtgcagcccacatctggtgctgtcctacttctgtcacaatgatggcgtcgccgtctgtctggcggtagatctcctccaccagataaggtccggtcagtcccggctcctggtatgtgagcggatattttactttatagtccagaatatgcgctatccacgcttcatgccccagctgcggcagttccgcgttgatccgctttaaaatttctttcaggtctccgatcacagccgcatcgacacggatatttttattgatctccgctgcatccacatcaaactgtaagatcttcgcctgctttgcaaacttcttggcattgccaagcacacggtcggaaaagcgtacgccgacggcgatcagcagatcgcactcgctcacgccgaggttggacgtcttggttccgtgcatgccgagcatccccgtgtagagatcgttcgtcccgtcaaaggctccctttcccatcagggaatcgcacaccggtgcgtccactttatgtacaaattcttttaattccgcgctcgccccggagatcacagcaccaccgcccacaaatatgtacggtttctctgccgcttttatcatcgcaagcgccttcgcaagatcctcttcccgtatcgtgtccgtcacacgcgcgatcggctctgccttgcagaattcatactccgtctttgccgccgtaatatccttcgggatatcgacgagcaccgggcccggacgccccttctgtgcgatccggaatgctctgcggatcgtgaccgcaagctttgtgacatcctttacgataaaattgtgctttgtgatcggcgtcgtgatgcctgcaatatcgatctcctgaaaactgtctttgccgagaagcggcacattgacgttgcatgtgatcgctacgatcggcacggaatccatgtatgccgtggcaattcccgtcacaagattcgtcgctcccggtccagacgttgcgaaacagacacctacttttccggtgcttctcgcataaccgtccgccgcgtgggaagctccctgctcatgcgaggttaaaatatgccgtatctcctgatgcttatataattcatcgtatacattcagtatggctccgcccgggtatccgaatacggtgtccacaccctgttctttcagacattcgatgacaatctgtgctcctgtcagctccatgtcgtataccttccttttctatcctactgttcttccgggagcgccagtattgctccgcggttgcccgaggtcacgagcgatgcgtaccgctttaagtatccggtcgtcaccttcggctctctcggctgccatttcgcctttctggcggaaagttcctcgtccggtacggcgagttccagctttaactccggaatattgatcctgataagatctccctcttccaccagtgcaatcggtcccccgaccgctgcctccggcgatacatggccgatcgacgcgccgcggcttgcaccggaaaaacgtccgtctgtaatcagcgccaccgaagatccaagacccattcccgcgatcgcggaagtcgggtttaacatctcgcgcattcccggtccgcccttcggtccttcatagcggatcacaacgacatccccggcaacaatcttaccgcccttgatcgctgcgatcgcatcctcctcacagtcgaagactctcgccggtccctcgtgcaccatcatctcatcgcagactgccgagcgcttgaccacgctgccgtccggcgcaagattgccttttaatacggcaagtccgccggtcttgctgtacgggtgatccaccggacggatcacttccggattcttattcactgcatccgcaatattctccccgacggtctttccggtcacggtcatgcactccgtgtgcagcagtccgatgtccgccagttctttcattaccgcatagacgccgcccgcctcgttgagatcttccatataagtcggtcctgccggtgccagatggcacaggttcggtgtcttctcgctgatcggattggcaaatgcaatatcaaaatcaaatcccacttcatgggcgattgccggaagatggagcatgctgttcgtcgaacagccgagcgccatatccacggtcagcgcatttaagatggcttccttcgtcataatatcacgcgggcggatatttttgcggtacatttccattaccgccatacccgcatgcttggcgagcttgatgcgctccgaatagactgccgggatcgtgccgtttccgcgaagccccattcccagcgcctcggtgagacagttcatggagttcgccgtgtacattccggaacaggagccgcaggtcggacaaaccttctcctcgtattccttgacttcctcctccgtcatcgtgccggctgcataggaacctaccgcctcaaacatggaagagaggctgcgctttttgccctgtacatgtccggcaagcattggtccgcccgacacgaacactgtgggtacattgatgcgcgctgctgccatcaaaagtcccgggacattcttatcgcagttcggaaccatgacgagcgcatcaaactggtgtgcaagcgccatacattccgtggaatcggcgatcagatcacgcgtcaccagcgaatatttcataccgatatgtcccatcgcgattccgtcgcagaccgcgatcgccggaaataccaccggtacgccgcctgcctccgcaacaccaagctttaccgcattgacaatcttatccaaattcatgtggccgggaacaatctcgttgtaggagctcacaatgccgaccatcggcttgttcatctcctcctcggtaaatcccagcgcgttaaacaaacttctatgaggtgcctgttgcatccctttttttacattatcactcttcatctatcttaactccgtttctgtcattctatctgatccgctcgcagatcagatctcccatctgtgccgtgccgacctgggttgccttttcctgctgcttctcctgcggcatgatgtcgatcgtccggtagccatcctttaagacctgcttcactgcctgctccactgcatccgcctcccgatccagatcaaagctataacgcagcatcatggctgcacttaagatcgttgcgatcggattcgcaattccctttccggcaatgtccggtgccgaaccgccgctcggctcgtagagtccgaactttgtatcgtttaggctggcgcttgagagcataccgatcgaaccggtcaccatgctcgcctcatccgacaaaatgtcgccgaacatgttctccgtcagaatcacgtcgaactgcttcgggtcttttaccagctgcatcgcacagttgtccacgagcatatgctcataggtcacttccgggtaatcctgcgccacctcctcgacgatctttctccagagtctcgaggaatccagcacgtttgccttatctacactcgtcacctttttgcgccgcttcatggcaatgtcaaaaccgcgcttagcgatccgtctgatctcgttctcattgtaggtcaacgtatccgtcgctgtcagcacgccgtccacttcctcggtcttgcgcgctccgaaatacagtccgccggtcagttcccgcataatcatcatgtcaaatccgtccccgatgatgtcgtcccgaagcgggcatgcggcttttaattcttcatataaatatgccggtcttaagttggcaaacaggttcagcgccttgcggagctttaaaagtcccgcctccggtctcttctccggcggcagctgataccatggcgaagtcgatgtgttgccgccgatcgatcccatcagcaccgcatcggaagccttcgcggaagcgatcgccgcatccgtgagcggctcacccgtcgcgtcaatggagcagcctcccatcagaatctcttcatagcggaacacatgtccgtagatctttccaagctgatccagaactttctttgcctctgttacgatctccggtccgatcccgtcgccggaaatcacgcctaccttatattccatctctctaatccctcttttcttcctgccgtgcaggaatccgtcttgtattgactttagtacattactaacagacagtatataaattctataataatgtatctcgggaaacaatgcaacctctgaatctatttttctttttcatactccctataaccgggtcttatgaaaaaggagcagcctgccttttgtgtccgctgctcccttctgccgtctcattccgtctgctctaacacaacgctgttcagtccaaaatagacgcgcatatattcatttctccagtcgcttttctcctctgtaatatcgtcgaggaaaagcatccacggctttgcggtatacgcctttaacaccacgtcttcccccgcagaatcacacaaaacggcgtagcgctcatcagcctccgccgaatattcctgtgcctcgccgctgcggatcagcaggtatgcctgccatgcggtcatattttccccgcatccgattatcattcccaccgcaaggacagcagccgtgatcaaaaaactgcccggaaattctcctgcagccccggacagtgccgccgccccggacgcctccagtcttgtgaccgcccatccgcacagataggcttcatttaacacaaacagccagacgaaggaaaaatataccacgttggtcagccggacgtcccccggcgttcccatcgcgtagatgggcggacagaacattgcgcacagccaggcgaccgacaacacaaagacaagcagcggatagcggaacgaaaatccatactgtccgcgtatcttctttaccaggggaagaagcaccggaagcaacaggaccgccgtgacaatgactgcaagtcccatccagctgttgatgcatgcaattccggtttttaccgcggtaacaatcgttcccgccacaccgggtctgtcggaaaaatacgactgccggattctggtgcccggcgacgtcacattaaaaaggaatcccgccaccatagccgcaagcgttatgacgcagcagatcaggttctgccgccgcttttttaccgcagcaaatattccaaatccgacaatcagcagtatccccacaaatgcggtcacgtgattcccgccggcaagcagcaccgcaagcagcaccgcaagcaccgtcctgcctgcttttctccgcgggtgctccccggcaaggctgagcagcacacacaacaacaataatagcaccgcatggaagaatacataattcatcgcgccgttataccagtacaatccctgcagggcggagggcatccattcgatcataagaaacgacatgacacagccggcagcaaatccctccagtctcgggcagccgcatttgcggtgaaagatataaaccgtacccgcgcagtttgcccccacaataattgcgagcagcaagattccggtcagcgcgtaatatttgtcgccgaaaattcccggttccagcgccagcagaaccgccgatgcataaagcccctgccacttctgatagaactccgctgatgtggcaaacgcttcttttatcacattccagaaagaatgtgtctcccgccagatctggaaggtgcggtaggcataaccatagtcatcccccgactgatgattgtacttcgagagtacggctaacgggatcagcgcgcaaaggctcaataaaatcagcagccacaaatatactttttttctcgcttgtaatttttccattctgttacctcagatccatcttaaatatatcgtatacaccaccggaatcacatagacgaccagcagaaatccggcatagaccaccgcaaaaatatctgcggcggcacagccaagtccggcgtagattttatccaggacactttttctccgaagcagacgtgataaaacgccccagccagccagaagcatcagtgccatgcccgtcaccgccgcgccctttttcattccccgcggcacataacaaagcgtaatctcattcgtaccctcgtcaagcggcacgagcatcagattgcccgcgagccggcttatggcccgctcctctccgtttaccgtacaatgccatccgctatccgcattgaccggaagcatcagatactccgctcccgccgattccacagtaagcttacaggaatcccgatccagttcatatgtaaccgcccttcccgctgcatccaccgcctccagcagttcctgcggatcgaggaatccgaagaacaccgctctctctgcgccgctgtccccaacagactgacggatttccaccgtgatgtcttcgtccgaaaaacacccaagggagaggattccctgattgccggttgccgggtagctctcattgtacagatcattgtaatccgggacgtagagcctctccccgtttaccgtaatttctgcctgctgcagatcctttccatagagatataagatctgctttccatccgcgtaaaaccggtacgataattccgctccggtctgatcatccagataggtctctttttcccagtcaatgggaactgtgtgaaaaagcagctccgacagccggttctggttctcaaacacattttccgtgtacgcttccgtggctgcatacgcttcatagtccgcttttgtgataaaaaatgccctgtccccgacggacccattttcccacagcgtaaactttttggtctcagcaagcggccaaagagaatccgccgccgtgtcttttccccacaatcccgccttagacgccacataataacggtaccccagcatgatgtcggacgcgagcgttccgcccgtgtcacttaatctggtccacacctgagaatacccgagcagtgtgttcatcctgatctgctccgacgtcatcagatgcagataattggagtaggaggtgctctctgcgatcagcggatagttgttgtcaatcgctccgtccgccagctttgccttgtggaaaacatcggtttttcccgcaagcggctgaccgatttccatggcatccccaacaaaatccgtctcgtccgtgtgcgtttccggctgtatcaaagaaatgccaagcgccaccatctgcacgcaccagattcccaggaacgcatataaaatgttccgccgcgtgcggctctcccccacaaaatccggcacgcgcgccgctgccatacaaatcacggcaaacaccagcatatagccatatcgcatcgggaagcacacatacgtcccgcggtgccagatgagattgaccgcctcgaagaaaaccggcagcaccatcgccgccaccagataccactgccagatgtgctcccgcttccgtctgccagaaatgacgaagaacagcagcggaaccgccacgctgccaagaatcacccatttccacaccgcgtccattccgtcctgccgaagcagcagaaaatagccggagattccccggtactcctcgcccgacagccggtaggaaccaagcattgccctcgctgccggcagaaatattaccgccgcaattccaagcgacagtaaagaagtcagcccgaattttaaaatgctgttcttttttagcggctggtcctgccggttcaggaaaaaatatccccccgcaaacacgatcaggaaaaaacacatcatgtacgcctgcggaatattgatgaggaataccagcgtcaggcagacgatatagccgagcgtatttttcccgagacgccagtccccttcccgctccgccatcctgcagaagaaataacacaatagcggcaggatcgctgccacatccagccagcccatgccatagtacaaaagcgtatagccgtttacggcataccccacgcttcccgccagaatgtagattccgtaacgctcttccttaaggatctgctcttttaaaaaccagcgcatgccatagcccatggcaagcagcttgattataataaatacaatcatggatttttcaatccagcttcttttcacaaagaggaagaacaggttaaacgggctgaacagagaaaactgcgcgctcactcccgcaaaattattcccgccgccgactctccagtcaaaaaaggcgctgccgtctccgtgcagcacatcccatacatggtaatatgccggaatccactgggactgaaaatccacagtgtcaagcgtggcaattccaaacggatagatgccctttatgatgcacaacagcagaaaaatggcagttgtcacgcagccgacggcggcacgtgaaacaaacgtattttttttacttttcatccggacaatctctcctcgctctccgaaatactctctcaaaaagaaaagggataatacattttatatactatccctcttaaaaatcttcttattcagttacatcttccggcttctcaactgcggagatggccgccttctgcatcggaatacggcagttcttgttgcttccgaactcaacgattactgtatcatcagcaatatcgatcactgttccataaaaaccgcttgttgttaagatcgtatctcccactgcaagttctgcaagcatggagttcttcttctgctgttccttcttctgcggacgaaccatgaagaaatacataaacgcaaataaaataaccagccacaccaccatactgatccagccagcggatgacgcactctctgttgctaagattgaaaacatctgatatcctcctaaaatcataaacttgtccgaagtcatccgacttcattaaagagtattgtacacaaaacctcgctgtttggcaagccttttccctcttacttttccatttccttttcccggttgatctgtcccatgctgtatagcttttcttccttgtaggaggcaaagtttccggcatccagcgcatcccgaatctcttccatcatcgtgttgtagaagtacagattgtgcagaacacataagcgcatgccaagcatctcttttgccttgagcagatggcggatataggctctgctgtagcggcggcaggtcgggcagccgcagccctcttcgatcgggcgcatatccttctcgtacttctggttgaacaggttgatcttgccctggttcgtgtatacatggccatgtcggccgttgcgggacggataaacacagtcgaagaagtcaatgccgcgctccactccctccagaatattggccggcgttccgactcccatgagataggtcggcttgttcaccggaagataaggcacggtctcatccagcacatggtacatctcctcgtgtgtctcgccgaccgcaagtccgccgaccgcatagccgtccagatccagctcggaaatccgctttgcatggtcgatccggatgtccgtgtagatggctccctggttgatgccgaacagcatctggtgacggttcacggtatcctccagcccattgaggcgctgcatctcgttcttgcagcgctccagccaacgtgtcgtccgtgccacggaatcctccacatatttccgctcggcaagcgccggcgggcattcatcgaacgccatagcgatcgtggaaccgagattggactggatctgcatgctctcctccggtcccatgaaaatctttgccccgtcaatatgcgagtggaaatagacgccctcctccttgatcttgcggagcccagccagggagaacacctgaaatccgccggaatccgtaagaatcggacgattccatgacataaacttgtgcagtcctcccacttccttgatcagcttgtctccggtgcgcacatgcagatggtaggtgtttgacagctccacctgacatttgatctgctctaaatcttccgtggagacagctcccttgatggcagccaccgtacccacattcataaataccggtgtctggatatctccgtgcaccgtatggaaaacgcctctcttcgcgcgtccttcctgttttaataattcatacatctgtttttcgtctcctttttattactcatgcaacaccggcgctgcttcacgcctccatcttcttcccggtcagttcgcttaacacggtaaaataattttcaaacgtcttgcggcagcacgccgggttctcaatgacaatcccgtcggttctaagtccgaccagggaaaatgccatcgccacgcggtgatcgtcgtatgtctccacgcttccgccgtgggggctgccgggatagatcgtggcagccgtctcttcctcctcacaccggatgccaagcgctgtcaggttcgtctgtatcgcgtgaatccggtcgcattcctgcccacggatatgtccgattccctctatgcgcaccggcgcgtcggcaaacggcgcgatcgccgccagggtcagcgcctgatcggaaaaatcgttcatattaactgtgatgccccgcagcgcaccgtccgccggtcccgttacccggacgccctccggcgtatcatccgcattacatcccatgcgctccaacacttccagaaaacgcagatctccctgtgtgttgtccatatgcacatgacgcacaagcgcccgtccgccggtcaccgccgcagccgcgtaaaaatagcaggctgccgacatatccggttccaccgtataagtctccttccggtaggaagcctccgcgggcacctcgtagtctcttccgtcaaaagtgacactcactccgaattcctgcatcattttccgtgtgatacggatgtacgatccgtccgtcttctcgctggtgatgtggatcttcatcccctccggaaccatcggcgcaatcagcagcagcgcgcttaaaaactgcgtgctcttcgtaatgtcaagggagagcctccgcggcgtctcccctgccgtctcatctgcccgggcagatctgcaccctgcgatgcgcaccggaagatgcccttcctcctcgaggaaggtaatcttcgcccccgcaccggaaagcagctcgaacagctccgccatcggccgccgcttcatctgcgctgaacagcggatctcataacacccgtctgaaaatccgagcatcgccgcaaggaaacgcgccgctgtcccggcgcttccgacgtcaattaccgcttccctgctgggaatcctgccgccgcagcccgtcacggtcacgcactttttttcttcctctatctgcactgcaaatccgagcgacacaagacacgccagaaagtgtctggaatcatcggaaaacaggacgccttccacgcgcaccgtccctgcggacagcactgccataagaagcgcgcggttcgtcatgctcttcgatcccggcacggttaccttccagtccaccggctctgttatctttttcacaaggtatttctctatcatgaaatattcttctcctcgcctgctggtacttctgctccgtcaaatcataacatatttctgttgcggcgcaaagtcaaatcttttataatcgagaaagatcattatgtaagcaggagggaatcacatggcagggtctacattgggaactctttttaaaatcacaacctggggggaatctcacggaaagggtgtcggcgtcgtcatcgacgggtgtccggcgggactttctctctgtgaagcggatatccagaagtttctcgaccggcgcaagcccggtcagtccagatatgcgaccccgcgcaaggaggacgatggcgtagagatcctctctggcgtgtttgaaggaaagacgaccggcaccccgatctcgcttgtcgttttcaaccacaatcagcagtccagagactacagcgagatcgcctcctattaccgtcccggtcacgccgattacacattcgaccagaaatacggcttccgcgactaccgtgggggcggacgctcctccgggcgggaaaccatcggacgcgtcgccgcaggcgccgtcgccgtcaagattctaaacgagctcggcattacctttatgacctacacaaagtccatcggcccgatcgccgtatcttccgggcactttgatttttccgaggtcacaaagaatccactctatatgccggacgccgaggcagccgagaacgccgaaaactatctggatgcctgcatggcggaactgaattcctccggcggcattgtggagtgtatcataaaggggatgcccgccggcatcggagatccggtcttcgagaagcttaatgcgaaccttgccaaggcggtcatgtccatcggtgccgtcaaaggttttgagatcggggacggatttggcgtagcaaaagcgaccggtaagaacaacaacgatgcctttgtcctcggtgaggacggcaggattgccaaagcaaccaaccatgccggcggtatcttaggcggcatgagcgacggaagcgacatcatccttcgggctgccatcaagccgaccccttccatcgccgccacacagcgcactgtcaatcagtccggggaggagatctcggtcaacatcaagggacgccacgatccgatcatcgttccgcgcgccgttgtcgtggtggaatccatggcagccatcacgatcgtcgactcacttttttccaatatgagcgcacggatggatgcgctaaaagatttctactcctaaaagaaacaaaaaggtgatacttcttctacgccggctggcgcaatcgaagtatcacctttttctttttcatactttctagctcatccgaatatgctgatgtgtaaacagatgatcctgacagtattcgtaattgccctcgcacttggagcagaaacggaattccagcgtcggatcgtcaagttccgtcctgccgcagacagcacacttgtgcttcgcaccgcccgcatatccctgcggtcttcgcatgtctgccttaaacttctggcgcctgtgcacctcgtgcggcgtatagcgcttgaggtttctggtggagaagaagaaaataataaagttgaggagcgacataaaaatcgccattcttcccgcccatccggtctcaaaaaagcttaaagcaatcagaacgccgtacacagccgccatccacttcatcttaatcgggataatgaacatcagaagaacctgcatatccggatacatacatgcaaacgcaaggaagatggacatgttgatgtaacttgtgctgaaactcgttccgatgagaagcatctccgtcgtcacaccgccgttcatcagatacatgataccgtacagcagaaacgctccgatgacggtaaacagcatacctccgaaaatatagacgttaaaccggaaggttccccatgtgcgctccagtgtcgttccaagctgataatagaaaagcgccataatgagaagatacaccagattcgtgtctgtgggcataaacacccaggtaatcagacgccagatctgtccgtgcaggatgtgatacgggctcaacatcaaaagtcctatgatcgacggattcacctggtagaggacaaatccgatcgtgtaagctccgatcagccacacgatcagattgggaaccgcccagttgccgaatttacgttctaatttatttaaccagttcatacactctgttcctgacctttccaaaaatgacattacgttgttcagtatatcggtcggggaaatctttgtcaatcagagggattcttctttacaaaaagtttatacttttccggcaaaatgcacattgtcttttgacatatcctgtcgtataatgtagagtgtttatcgccagattgacactatttataataagaagaaatcttttacatattttactctgctaaagtatttactttacgagaaacagccatggagggaattatggaaaacaatacacttcataaattgggaatcgacatcggttccacaaccgtcaaggtcgcaattttagaccaggaggatcatctgctcttctctgattatgagcgccattttgccaatatccaggagaccttatcctcccttctccagaaagcttacgatgcactcggcgacttttctgttgcaccgatgattaccggttccggcggtctgacactcgccaagcatctcggtgttccgtttgtccaggaagtgatcgccgtgtccactgccctgcagcattatgcaccgcagaccgatgttgccatcgagctcggtggtgaggatgccaagatcatctattttgagggcggcaatgtcgagcagcgtatgaacggcatctgtgccggcggtaccggttcttttatcgaccagatggcatccctcatccagacggatgcgacaggtctgaatgaatacgccaagaattacaaggccatctacccgatcgctgcgcgttgcggtgtctttgccaagaccgatatccagccgttaatcaacgagggtgctaccagagaggatctctctgcctccattttccaggcagtggtcaatcagacgatcagcggtcttgcctgcggtaagccgatccgcggtcatgttgcctttctcggaggtccgcttcacttcctttccgagctcaaggctgcttttatccgcaccttgaatctggacgacgaacacgccatcacaccggagaattcccatctatttgctgcgatcggttccgctttaaattacaagccgggtgagacgaccacgctcgtctctctccgcgaccggctcgcgaacggcatcaagatggaatttgaggttgcccgtatggatcctctgttcgccagccaggaagagtacgacgctttccgtgcgcgccacgacggacacaatgtcaggtccgcagatctctccacttatgagggcaactgctatctgggcatcgatgcaggttccaccacgaccaagattgccttagtcggcgaggacggttcccttttgtattctttctacagcaacaacaacggaagtccgcttgcaacggcaatccgttccatcaaggagatctatacgctccttccaccgaaggcaaagatcgtccactcctgctccaccggatacggcgaagcgctgttaaaagccgctttgatgctcgatgacggcgaggttgagacggtggctcatttctatgcggccgcgttcttcgacccggaagtcgactgtatcttagacatcggcggtcaggatatgaaatgtatcaagatcaagaatcagacggtggattccgtgcagctcaatgaggcttgttcctccggctgcggttctttcatcgagacgtttgcaaaatccctcaactactctgtacaggattttgcaaaggaggctctttttgccaaaaatccgatcgatcttggaacccgctgcaccgtatttatgaattccaaggtaaagcaggcgcagaaagagggcgcatccgttgcagatatttctgcgggtcttgcgtactctgtcatcaagaatgctttatttaaggtaatcaagctttccgatgcaagccagctcgggaaaaatatcgtcgtacagggcggtacgttttacaacgatgccgtactgcgcagttttgagaaaatcgcgggtgtcgaatgtgtccgtccggatattgccggcatcatgggtgctttcggtgccgcactgatcgccagagagcgtcacgaggcaggctaccagacctccatgctttccatcgaacagatcaatgcgctgaccttcgacacaaagctggcaagatgtcagggatgtaccaaccactgtctcctcacaatcaaccgcttttccggcaaccgccagtatatcaccggcaaccgctgtgagcgcggcctcggcaaggagaaaaataaagacaacattccaaacctctacgaatacaagaacaagcgcctgtttgactacaccccgctttccgccgaggaagcagcacgcggcacagtcggtattccgcgcgttttaaatatgtacgagaactacccgttctgggcaactttctttaagaagctcggtttttccgtggtactctccccgcagtcgacgcgcaagatctacgagcttggaattgattccatcccgagcgagtccgagtgctacccggcaaagctggcacacggtcatgtgacatggctgatccaccagaacgtcgattttattttctacccgtgtattccttatgagcgcaacgaattcccggattccaacaatcactacaactgtccgatcgttacctcctacgcggaaaatatcaaaaataacgtggacgagatcacttccggtcaggtgaagttcttaaatccgtttatgtctttcgccagcgaggagacgctttcctcccagctgattaagacctttggccagtcggagttcgggattccggaatctgagatccgcgacgcggttgccgaaggctggaaggagcttgccgtctgccggatggagatgcagaaaaaaggcgaggaagtcttacagtatttaaaggagaccggaagacgcggtatcgtcctcgcaggtcgtccgtaccatgtagaccctgagatcaaccacggtattccggagctgattacctcctacggcatcgccgtgctcacggaggattccatctcccacttacagccggtggagcgcccgctcatcgtcatggatcagtggatgtatcactccagactgtacgcagcggcgaactatgtcaagacaagagacgatctcgacctcatccagctgaattccttcggctgtggtctggacgccgtcacgacagacgctgtcaatgatattctgacaaagtccggcaagatctacacctgcttaaagatcgatgaggtcaacaacctcggtgcggcgcgcatccgtatccgttccctgatctcggcgatccgtgtccgtgagaagaagcagacgaagcgcaccatcgttccggcgaattacaaccgcgtcgtcttcacggaggaaatgcgcaagaattacaccatcctctgcccacagatgtcaccgatccattttgagctgttggagccggcgttccagacggccgggtacaaccttgttgtcccggatgtggacagccgcacctgcgtggatgtcggtctgaaatacgtcaacaacgatgcctgctatccgtccctgatcgtggtcggccagctgatggctgccgtgatgtccggcggttatgatatgtcgcgcaccgcggtcttaatctcccagaccggcggcggctgccgcgccagcaattacattggcttcatccggcgtgcactggaaaaagccggctatccggacgttccggtcatctcgatcaatctgagcggtctggagaaaaacccgggctttaagctgacactgccactgatccagcacggactctacgcgctggagtttggcgatatcttcatgcgctgcgtctacgcaacgcgcccttacgaggcggttgccggatcaacggacgagttgcacgagaaatggaaaaaagaggttatcgcctttattacccagaaaaagatgctctcccacggcaagttcaagaaaatgtgccgcgagatcatccgcgattttgacaaccttccgcgcaaagacatcaagaaaccgcgcgtcggcgttgtcggcgagattcttgtcaagttccatccggctgccaacaatcatctggtggagcttctcgaatccgagggtgcagaggccgttgtaccggatctgaccgatttcctgctctactgcttctacaatacgggctttaaagcagacaatctcggcatgagccagaagtccaagaagatcggccgtctgggcatcaatttctttgagtggctacgcagcgctgcaagagatgaattcacaaagagcaggcactttactgcacctgcgcacattgatgatcttgccagatatgcaagagacattgtatccgagggcaaccagaccggcgagggctggttcttaaccggtgagatgttagagctgatccacaccggaacaccgaacatcgtctgcacgcagccgttcgcctgcctgccgaaccatgtggtcggcaagggtgtcatcaaggaactgcgtcaccgctatccgggttccaatatcgtggccatcgattacgatccgggtgccagcgaggtaaaccagctcaaccgtatcaagctaatgctctccacggcaaacaagaatctggcacggcagactgcatcggagcagaaggatcaggctgcaggctgacagatacagagaaaggggctgcgcatcaaatgtgcagccccttttcgtgataagtaatattatcagaagatcacaccgtgggatttcagatggagatacagagggaaatttggttcaaaaaatgtggcatttctaaccagccggatgtttgcatcttcgatgatccgtgtctttccaagtttggagcactccgcgggtcatgtccgcatcccggaagacaatttgtaggacttttgtgtgtgtcccttgcggcacctgaaagtccgcccattgtctccggtgtgtcggacatgcacccgtcggattgtccaaacgtggaagagacacggaatccgatgcaaacattcggccggaagaaatgctcacatttttctccaacgaattttcctctgcatttccacatgaaatctgtaggtgtgcttcttataatatttaatattacttatcataaaaaggacacggtacacttcatgcgcgccccttccgctgcattgcgtcagccctgcttaggacagccacaggcacgcaagctgcaccgccacaatgctcaaaataacactggcacacacatacccgatccccagtccatagcttccgttctggaacagctggctggtctcgagtgcaaatgtggaaaatgttgtaaagccaccgcagacgccggtctttagcgtcagtaccagaagcggcggaagcgaatgcttttctcccagaaccgccagcacgccgatgacaaacgcaccgagtatattgatgagaagcgttttgaccggaaacccgttggacgcgcccaccggcaccagtccgatcaggtaccgaagcatcgcaccggcggctcctccaagtcccacacacagacattttatcatgctaatctccatttctgagcgacttgtcgcgaagaggcgaagagaaattcgcaaaagcgatttctcttctgccatcaaagctatttgctttcgctcagaaacaaatagccgtgtgaaaaatcacatatcaatgtaatttttcacactattttcctcctacatattccagcatcagattctcaaattccgtataatctttgcactttgcaatctcctgcacgtacttttcctccacaaacagcgaaatcagattatcaaaaatatcataaaaaagcatccggtctctctcgctgatacaaagcagcagcacaacattgacatactgcgtatgccaggggatcggtttctcactgataatcacaaaaataccggttgatttgcccatcatttttagggaatgcggaagcgcaatcttgccgaacgccgttgacgcctgtttttcacggtcaagcaccttttccgtaaaatcctcagctgccatgccgtcctcaatcagccgttttgtcatgtaagtgattgcttcctcggcggagccaaacgttggatttttcacaaagtatttctgattcagtacatgctttaatcttccctgcagttttctgttgctgcgcagacccttgattttttgaacacgttctttgatcgcaagaatatccttctggttgcagaacgggctgattaacacaaactgctccttgtccgctccacggatcggaacggtgctgatgataagttccgcctccggtttttcctccggcagcgtctcataggcaaatgatatcagcagttcgtccttaaactctttctcgatcttctccaacaggcggtttgccacatggtaatactgcgggaaaatgacaaggcacgaaatcttttccttttcctccagcctgctctccaggcggtcgccgatatgcagcgccagataggcggtctcactcatatccatctgcaatccatattcctgctcgatgatgtccgcaattccgatcgcacactcaaacgtcagcgggcaggattcccggatgctctccgtcagcatgttttttgcagaatatccgctgcgcagacgcatcagcagatttttaagatgacccgcaaatttgtaacagaaggtctcatcctccatcagatcgtccaggtcaaattcatccttcaggtattccagaatccgaacaaataaaagataggtacgctcatctaaaaattcctttggattttccgtctgctccgcgggtctgcgcctgcaaatcaggctcataatcatcagttttaattcgttttcctcgacctcgtccagatgaattgcatagtcgttctcgattcgttccagaatcgatgtaaataagcgataccgatcctccctgtattccgccgtcacctcatttttttcttccaatacacagtgattctggattctcgccatactgatcgcgatgtccagcagaatatccatcagtgcatattcattcagatagcagctgtttttctcgctttcctccatcagaatcccgcgcagatggacaatatcgatctgcggtatcatcttctggatagacgacatctccagttcattctcccggaacagctgatagatcagttcccggaatgccttacgttttttccgctctgttccatagatgccgactgcgtttccgtgtgtctgcagctccagtccgtatgtttcaaacgattttttcaccacggcaagatctttttttgtggtctctatgctgacacacagcttttcactgacatcaaaaagatcgatttcctcctcacggatcgcacaggtaatgatccattccatgagatagacctgtctctcccccggactctgcgggatggctgcctcatcctgccgcacaaatgccttgatatcttccatctgcatgcggtagccgcgtttggaggattcgatgggatcatgcagcagctgattgatctccgctatatagtttttcacactccgctcagatacgttcagcttcatcgccagtgttttggctgtctgccattccttgtcttctgccagtatcttaatcagctcattgtgctgctttttcatcctctccgctcctgcctttccctattgcgccgtctattgtatcatatctgacttttcttttccatccggtattttctgtaacacagaatacgacaaaagaagctcatggacagattttctgtccgctgcgctccttttgtcctctttttttattttttacagttctgccccgttggtctcaatcacatgctgataccatgcaaaactgtcctttttgattcttctgccgcttccttttccgtagtcgtcctgatccacgtagacgaagccgtaacgcttgctcatctcggaagaagaacagctgatgatgtcgatcggtccccatgcatagtaaccgcgcagatccacgccatctctgattgcctctttcatctgctcaatatgtgccttaaaatattctacccggtatggatcgtggatcgttccgtctgcctctaacttgtcaaaatatcccacaccgttctccgtgatgtagatcggacactgatagcggtcatagaacacattcagcatatagcgcagaccggtcgggtcgatcgtccagccccacgggtttgccggaagctccttgttgcggtatgccgagttgtccttctcatagctttccttgtcgcacacgcgtgtatagtaataggagaaagacataaagtctgcggtattctttaaaatctcctcatcttcctcgccgaatacgatgttgtagccccgctcctcgaagaaacggaatgcatagcccggatagcgtccccggagcaatacatcggcgcagaaatattccatctggttatgccgcatacatgccaggacatcctccggtttgcaggttgccggatatgccggtccgccgcagagcatcatgccgatcctgatgcctttgtccagactgtgcgcgtaggcggttgcctttgcgcaggcgaccatctcattgtggacggcctggtattttgcctctgcaatattctcaacgagatcctccgctaccccgagatggttaaaagattctactgcaatcagattgatctggtttacgatgatccacatttttaccctgtcgccgaaacggtcaaacaataccttgcaatagcggtagaagaaatcgatcacctctctggaataccagcctttgtaatgtgtcgtcagatacagcggcatctcgtaatgtgagattgtgatcatcggctccattccgttggcaatgatctcgttgatcagatcgtcataaaacttcagtccctcttcattcggctctgtctcatcgccgtgcggaaaaattctcgcccagttgatcgaagtgcggtaggtctttaaccccagctccttcaataactttaaatcttccttgtaggtatggtaaaaatcaattccccaacgcttcgggaatacacggtctttgcttgcaacggcgtccttgatgtactgtgtcgtcacctcgccgttatatttcttctccagcgggatatcgtcgacaaactcattgatatctgcgatgcacagcccctttccgcctacatcatatgccccttccatctggttggctgcaaacgcgccaccccagaggaaatcctttggaaatccttccggtactctgctcattttttccctccaaacctgtcactccgttattttgcaatcttttcttccagtgtgcggatgcgctgctcatatccctcaaaaatcaacaacagctgctttgtcatgtggatctcactgtacacggtcatcagcgtgtcctgcgcatgggcaaacagcagactgtacgcctgtgtctctccaccgatcgagccctgaatggcatctgtctgcacatgatgtgcctctgcaatctgcccttccgctttttttatgagctctcttgcgctttccacattgccctctgcgattgcctttaaggcgtcgttgcagctcacgcgggcatcgcccgcgctcataataatctgcattgcctctgcacttacctgatctaattcgtcatccatattattttctactgccatggtttttctccttattactcttacttctgcttctgtttatttctgctctgccgcttcctcctcgcacacctgcttgtcatagatcttaaagaacggcatccagatcatccaggatgctgcaaatacgatcagcatcagtacgataccaaacagggaacgtgtcgtaagccatgtacagatcgggaacggacaataccacatgttaaagagtatgtccgggatcgggaacagcggaatcactttcgtcaatacataaatgatgatcggaaggataattccctgcagccacatcggaaccatcagaatcgggttccatgcgatacagccgaacacggtcggctcattgatattgaaaacagccggtactaataccgcttttccaagtgctttcattctctgtgattttgccatcgtgagcatcataatcacgagcggcatcgtacagccgatacctccgatccacagatatgcggaatatacggtcgcatctgtaaaaatagataagttcgcattggttgccattcctgctgcggcaagctccgcatttgcagatgctgctgcaatcatgatcgggcttaccaccggtgtcagtacccaggtggaaatacccatggaatacaggaagcaatataagaacatgataaatacaaaaccgaacggattctgtgcaaaattctgcagcggcatgaagatatccaccacaatctggtacaggtttaagttcaggaacgatgcatcagttaagatccatccgagaaccgcaacaagaccgatcgggagcatggaatcaaaccatgcgcggacgaaatccggaattacggaatcctctttgaaaaagctgaaatttccaagcaggtttacgattgctgccgctatcagacctgcaataatcgcaaggaacataccgcctgctccgataccgccaatgctggtaaaaccggaaaatgcgatatcaccgctctctaagtttgcctgctgatctgcgatgaactgcggattgatggactggaaaaacaggatcagtccggcaacaccggcaacgatacggctctttcttctgcgctttttctccatcaggttaaacggaatcaaaaatgccacaaaaatggataccataccgaatgtccagttatagatggtccagaagttcggccaccagctgatataatctcccggaatcgtcagaatacaaaagatcgatcccaaaaagatcagcggcattacctgcatgatcgattccttaatcgtaagaatccacggattattatttattttctgcatcttcggcgcaaaactctcgttcagccacttcataaatttgttcattgtagttgccccctcttctctattcgcccacaacagacagcaagtgatcgattgccttctcaccgtttaatacggaatagtattccggtttcatcaggatcacctttacatcggttccctcgcaccgctcttccatctcatcctcaagatactgtaaatgcggtccgatcatcaacgcatcgatctcgtcaatatagttctcgatctcggattcacttcttgctgtgatcttcatatcaagacctctctttgcggcttcctttctcatattggctgccataaaaccactgctggcacctgatccacatactaacaaaacgttcaacatcttcgtttcctccttacgtctctgcgccttcgcgcgcttcgttttatcttgaatcaagaatactatcgaaccgggggctccttcaaataattatttgcaccgtatccgtgcaaaaagggactgccgcgtaaaacaaaccgttccttttgacgtaataaataatatgcaaagaaatcaagcatttccagctgaaagcaaaggtcatgatctttcttatcgtattatctatcgcattaaaaagggaccgcacgtttcacgcggcagtcccttcttactcttctcttatgtaagtttacttttatatttctaatctgaaatccggttcagggtcacatcgtccactgttccccagcttttcacattgcacttaaaacgcacgccgatcgtgagcgtaccgtccgtaaccttgattcctgtaacggtcggattctgccagtctgcgtaggtcgtcatcataaacggatctgtccattccgtaccgtctgccactgcatacaattccatcgaagcgtccgctgacatatctccgccctgtgcgtacgccgaaagctgataggttccaggcgcaagatccgtaaattcctgctcgatggaaaagttcatatcggaatctcccgaccagaaatggaacgcgatatctccggtgtaggcatcatccgccttgttctggaaatcggtcggattattctctccctcgtaggaaaccttccacatcgaagtgtcctcatcctcaaagctcggatttaagacgtaattcaccatctccacttcaacctgtgccgtcactgccgtaccgtccgcaagcgttcccgccacctcatagcttcccgctttgctcgtatcgatcgcagcaagctgctctgcatcccaggtcacgttctcctgtgtgtttgccgcgcggtcattatataccacctcaaccgcatccggcagcgtcacctcaccgcccacatcgcaggttaccgcaacctccggaataaaatcgacggcaagcggcgccgtcgcaccatatttcaaatatttgaatacatttaatgaggcaagcggatgtcccgtaaaatcaaacatcgcctgattgtcccaggaacagcctccgtaatacagtccggcatcctccggatcatagtccgccgaatagctgctcgcccagccgcttccgtattttttccagagggccgtgttatccgcatcggcatctccgaccggaatccaggtgccttcccagtaaaagacaccgagcgctcccgcctcgtccgccgctgcacagatgtcgcggatcatcgtcgcctggctctgcaccgtcgccgcatatccgtccaccagatcctccgtgccggcaaagctgttcgcaaagccgtcgccgtcctctgtcgtatagcagtaggacgtctctgcgatatagacatcttttccgtaggtgttctcaatattttccgcaactgcctgcatattttccatggtgccgtcccagtaaggataataggacagaccgaacagatcgtaatccacgccggcattctgcagattggctgccatggtatccacttcctcactgtcatcaatgttcgtgtaatgaacggcaaccttgatgtcttttccgtattcgtccgcaatctcacgcaccgcgcggcttcccgatgcaatcagatccatgaccgtatcgacatcctcctcgcctgccatgccgttgttgatctcgttgccgacctgcaccattccgacgtcgacacccgcgtctaaaagctcggcaaggctttccttcgtaaaatcatagagtgcctcgctcttttccgacgcactcatgccctcccaggctttcggtgcatgctgtctcttcgggtccgcccagaaatccgagtaatggaaatccacgcacaccttcatgccgtacgccgtcgcccgttttccaagggcgaccgccgtcgcaacgtcattgttgccgccgccgtacccgtttccatccgcgtcatacggatcattccacacgcggaggcggatataatttacgccggactgtgccagcgtctcaaagacatcctgctcttttccttcataattgtaatacgtcacgccgctgttctccagtgaaagtaccgcggacgcatccattccccggataaaatcatccggcagatcggcgatcggctccacatagatctccgactcctccggtccatccggcagtgcaaacgtcgtcaccttattatcttctgccgccgtcttaatcccctccgagacctctgtctgcgcgctctgctctgttcctccatcgctcccgccgcagcctgcaagcgccgttacggcaagaccgccgctgaccataagtgccagccattttctgtaattcctgttcccacacgttttcatcacttcttctcctgcaaaaaatgtagctgcgcaaccggttacgcagctacattttatcacaaaaaggcgtttatttcaacctccgttctgccagaaccaccgtttgtcccgacatgctctgtgtttctctgatcggcgcaaactgattttttctccagaaatgctctgcctgcgggttgcccttcacccagcagagccgcacggtgcggattccttcctcagccagatgacgacacagatcctccacaattctggtgccgatccccgcctgctgaacagaagcctccatcataaaaagtccgatatacgccatcgcccgctccgggtaatcggcaatgagatccatctgtgcaagcagtgtctctccccggaaaaatcccacgtaatacttatcatcggggagttttccgggcggaagcgccacaagatctgacaggatgctgtctcttgtcacatacgggggacaatattcataatacagattgttcttccgggagagttcataaatggctcccacatcctgctctgtcagtacgcgtacctgatatttttccgaccagcggctgatgtccattctcttacagcgtccccggatctgtccgtcttttccgacccagacaagcattccctcatccagtcccatgttccacacctgctgctcctccatgcgcaccaggcaggtttctccctgttcgtttaccagcgtgatctcatcatacgccgcttccccgtcatcacgtccttcacagccaaaatccggctcgtcaatcctaagaatccgatattgcttctgtccgtccttcattgtcgtatctctttctctttgttttcattctcccggcatccggtcagcctttataatcgatgtgtccgccgaccaagcgttcctctttcgtctgcaccgtattcatccgctcattctgctggtaatcgctgatcttttttaacagctcctcgatacttgacgccgtgatcgtcaccgtattttcccagtctgcctcagacgcctcatctgtcttattcacacgctctgccgcatgttcgtctctttgattttttccgtccctgatccgcttctcctgcgcttctttctgcgcccgtctcgcctccgccttcttttcttccgccgccttctcgcgctttttctcgatccgctccttctgcgcgtcggaagacttctgcagcacggcaaaataggtggcggtgccgccatcattcacctgcatgccgtagccttttacttttgtgccggaagcctccagcgaacttttcatctgtgcaatgccgcttcccgcattcgcaatgatcgcctcgtactgtctgcggtaattttcatcctccgccatgcgctcaatcttgtcctcgtcgatgagaactaccatcttcgatgcattggcatagcttcccgcctgcgcccttgccttctccttctgatcctcgctgaccagaataaagtccatattggaatattttcttttcagttcttcataatactttgccgctttttcgctgagtttcggattgccgatcgttcttccagtcaccgttccggttttccctgtcctgtctgtcctgtccgccttattggctttcccggtcttctctgacgatgcgtttccatccgtcttttcttttccttttgtgtctgccgccttacggttataggacatggcacttcccactgcatttgcataatccggtatcaaactcatacaaatctcccctttcgccatttccacctgccgaaatccgtttcggcaggtctgctctctttactttatatatcggtcagatatgtccatcttgccattgcaaatttaaaaaatcaaaggtaagataaaaggagtatcttttcgggaggtctcttttcatgaaccctacagtaagcattatcgtacctgtctacaatgcaaaaaattatctgcagcgctgcattgacagcattctgcatcaggaatataccgactacgaactgttcttagtcgacgacggaagcacagacggctccggtgacatctgcgatgcttacgccgccgcagatgcccgcattacagtcatccacaaagaaaatactggcgtatcggacagccgtaatctcgccatcagccaggctcgcggcacttacctgcagtttctcgacagcgatgactggatcacaccggatgcgacaaagctgttcgtgcgcgccgccgcagagcatgactgtgatctggtgatcgccgatttctaccgcgtggtcggggagcgcgtctcgcacaagggcgacattgaggaggatggcgttctcacacgcgaagaattcgccgcccacatgatggagaaccctgccgatttctattacggcgttctctggaacaagctgtaccggcgtgatcttgtggaaaaatatcatctgcacatggatgtctccgtgagctggtgtgaagactttttgtttaatctggaatatattttacatgccaatgtcttctacgccctgcaggcgccggtctactattacgtcaagaccaaaggttcccttgcaagtcagggattaagcatcacgaagaccgtcaagatgaaattcatggtctttgaatattacaatgaattttataagaatgtctacgatgaaaaagcctatgaaaaaaagaggctgtccgtctaccgctttttcctggatgccgccagtgacggcactgtgccgccgacgcttctgccaggtgcaaaaaagctcggcacagagcgcatcccggtctgtccttccgcgatctccggagagggtatcctatcggagttctaccggaaccgcaagcttttggaccgctgtctggaggcgatcgccctgcgcaatgatctgacgcttggcgagctgtccctcctgctgtccttaagccagatgcatacattttgtagccgcacggaacttgccgattttgccggattatccaaaagctcgctctcgcgcaccttgcaaaagctttccgccaaagattatatccgcgtcatcagtaccagaaaatacctgcacgtggatctgcttccggcagcgaccgcgctcctcccggagctcgccaccgcacaaaacgattttgatgcggcgcgctttgccggattgagcgaggaagagctcatctgctatgcgaaagtgacggaaaagatcaaggaaaataccatgcgggtgctaggcgtctagcgcccgtccgtgttttttagataccgtaacaaaaaagacaagtacaaactgcttttttgtacctgccttcttcgattagaatgaaattttcccgttcccttacgctccgagaatctcctttaagtctgcctctggtgtcgtgatcggtgcaatatggtaatgctccaccagatatgctaacacattcggggagataaacgccggaagtgtcggtcccagcttgatgttctggatgcccagatgcagcagcgtcaaaaggatacagaccgccttctgctcataccaggacaataccatggataacggcagttcattgaccgagcagccgaatgcctcggcaagcgccaccgcaaccttgatcgcactgtacgcatcgttgcactgtcccatatccatcaggcgcggcagaccgccgatctccccgagatccagatcgttaaaacggtattttccgcatgcaagcgttaagatcacgctgtccttcggggtctgctttacaaattccgtatagtaattgcgtcccggtctggcaccgtcacagccgcccaccaggaagaaatgacggattgcgccgctctttaccgcatccaccacctgatccgcaacggagagcaccgtgccgtgtgcaaatccggtcatcacctctctgccgccgttgataccggtgaactccgtatcttccttgtaaccgccgagctctaacgctttctcgatcaccggcgtaaagtccttgtccgcaccgatatgcaccatctgcggataagaaaccacctctgttgtgaatacacggtcacggtagctctccttcaccggcatcaagcagttcgttgtatacagaatcggcgccggaaccccgtcgaactccttctgctgattctgccatgccgttccaaagtttccctttaaatgcggatactgctttaacagcggatacgcatgtgccggaagcatctcaccgtgcgtatagacattgattcccttatccttcgtctgctccaaaagcagttttaaatcgtagagatcgtgaccggtgatgatgataaacggtcccttctccacggtaagcggcacctttgtcggcttcggattgccgaatgtctctgtgttggcgcggtctaaaagctccatacactttaaattcacctcgccgacttccagaaccaccggaagcaggtctcccatctccagatcaaagcccaggaacgaaagcgccttatagaaaaatgcattgaccgtctcatcctcatagccgagcaccgccgcatgataagcgtaggcagccatgccccggatgccaaataaaatcaaagacttcagggaacggatatcctcatccgcctcccagatctccttcatgtcgtaatccgaggtattgccgcacggcgatgcgcaggtggcacagttcggaaccacgcgttccttctccgcatgaacctttgcgatcatctcacgcagtgtctcatcattaaagttgacattcgtgatcgttgtgaataatccttctattaaaatatgtgtggtgtcctcggtgtgtggattgttgccgcacgcctttgcaagcccgatcaacgcgccggtcagttcatcctgcagcgctgccgtcgcactgctttttccacagacgcctgcattcccggtgcagccgctgcatcccgctgtctgctcacactgaaaacaaaacattttatgttccatattgatctctcctttgatttcctgattgattacctacgcattgtatgaaatctccggagatttttctgttgtttttccaacaaaacaattcttttcgcttttatttttcgcagagctccgacaggggatgaaacgtgtatcccatttcctcccatttggtcagcagttcatccagaatctccccgttcgtcttcgaggtgctgtgcagcagcacaatcgcccccggatgaattcttcccagcagcttttcaaacgcctcctccttcgtcggctgtgcatcgacattccagtccacataggcaagactccagaaaaaagtgtgatagccgagctgttttgccatctcgagattcttcgtgctgtattttccctgcggcggtctgtaatagttcgccatcttctgcccggtcacctcggaaaaaagcgcggcgttgtcgtccatctctttctggaacgcggtaagatccgcgatcgacgacatatcaggatgatgataggtatggttccccaccgtatgtccctccgccaccatccgcttggcaatctccggcgcgctctccagaaaatgtcccaccacaaagaaagtggcaggcgcctggtgcttttttaatgcatcgagaatcggctctgtattcccgttctcgtatccgcagtcgaaggtcagatagagcaccttcccggacggatccccgacatagtgtgcatcgtactgcgccaactccgcagaggttgcattgccggtgggctgggttccctccgcgccaaagccgagcccccagttgcccgcctcgtacgcgaccgccgccgtctcttttgtctgtctgctccgcatcccggcgatctcccacccggttaaaaacatcgcggaaaataaaaacgcaaggcacaggccctttttacaattctgctgcataacaagatcctgtctgttctcttgttatctatgtatatcggaaaccgccctgtcccatgacagaatcagccgttattctgatagccgcacttcgggcagacgccgccgcccttatactggtagccgcagcggaagcagcagattgtatcgtgcttctcgctcgccagataggtaagctttctggactccggcttctcctgcagataatgaataaaatcatcgagttccccggcatagtccggcagctccttcgtgccaaccgcataagggatctttaatttggttccgttcttctggtgcacgtaaagtcccttattgagcagtcccgtagacgccgtgacagacgcaatcgaggcgaccgggattccgtaggaggtaaatgccgtgctgtagtaaagatgctccggcgttaaaatcatcccctcttttccagacgcatcgcgcgccacatccaccaccagaatcgggtactcaaacagacctctgccggccgcataggacgccatggcatattcgatcacatccgtctcctccggcgtcgcctgcccaagcagcactttcctcgccggataaaaatgatgtctcggattctccccgacaccgttctcctccagttcttttttcagctttcccaccagaagctcacactcgtccgccttgattttggagagccgcttttcgagcgtcttaagcgcatccgtcttaagctccgggagaaaatctccctccttgatcttctggtatgcctctatgccctcctcaaaattcatctgcatcggtgccggacagattgctgcgatggcatccgcatccagctccctgatccggtcgttgaccttctccagatagggtgccacaagccccggaagaaaatctccctccctaagccgctctgcaagatccacgtagtccttcctgctcacttttctcgcgcgccggatcatgttggaaagttcctgcttctccgctgcctctctccccgccacaatcttctgttcgtatggtgtcagatccactccgtcgtaatcgtgcagccggtcgacatagagccggtactgcttccggtcgagattcgccggcatctttgccaccatcgccgccacttcgcgctccgcctggctctgtttgagctgctgcagcttctcccgcagcggatgcttctgttcttccggaagatccgcagcttccacttcctccaatacccgtttggtcagcgtgtagttcttcccctcacaggcatccgctttttcctgaagttcccggacacgcccctcataaatccggtcctgtatcttctttatatatggcttcttctcgtcctccgtcagcttgcgctctccttccagctgccgctttaactcctgcagctgccggtcggaatagcggtccatgaccgccagacgcgcctcatagtgctcctgcacgcctttccgttcttccggtgtgacaatgacgccgtccacggtcattcctccctccggcgtctgcgttgccgcatggatgtcttttccgcctgtccgctccttagcggcgggcctgcccgctccatccgcgtccggacgcaggctgcttcctgcctccgccgctctgcggtctgctccatgcatttctgcctccgccgctctgtggtctgctctgcgcgtttccgtctctgcagccataccgcgtccgcggtctgccggtcgtccactccctacgctgtctgtctccttccgccccgctgactgcttcgccgtctctttcggtgtccgcgttccagactgcttatccggttcttccgctgcctgttcccgctgcggcaaagagcgtccctcgtcgtgccgctctctctcccggctgtgcacttttgcctcgtatttttccacggattcttccggataaaagccctcctccatccgcgcggacagctttttcacctcaagatccgacaattccggcagtgcgttgcagagatcctccagggattcctccccgtcctcctccgtatccggccgtcttccgtcggcatagacattcgtgtgatagttggacacccggtcggcatttctccccaaaagctccagataatcgtcatacgccgcgtcgtccgtcgcaaaatccagcgtgtaaatatcgccctccgagaacaatctgccgggacgcggcgtgtaaaaccgcctgcaggcattgcaggtcgcggctctcgccagcagcacgccgccctcctccgtctcgatcttaaattcctttccagccggatagaccgccatatgcagcttgccgcagcatgccgggcagagataccccacgaggtaaaaattattcccgatccggctctttctccgctcgctcaccgtgatgtccgcccgggcgaactccgcctgggcgcgtttccagacgaccttgtgccagagtccgccctcgttcgtttcctcatcctccggctgggtctgctcctcttcctgcgccgtctggataacatcctcataggtgatccgcattccgctccggtagaaacgcagataggacggcgtgtactccggttcgacctgcatctccttcataatgtccgtaaacagcgtatttaactgttcaaaacttttgtctacgcggacgcccttgatcgtcccccattttccgaatgcatacaaaatcaggttgatggcattctgcacccgcatgttcgtgccgacctcaccgatctcgtcctcttttaccggtatgtcgatgatgttcgtcgccacattgcgcgtgtcaaaatggaaaaacagggaacgcacctccccctgtaaaatcatgtaattgtcaatcactacaaatatgccgttccatttgaccggaactttcatcgcctcaatcaggcgttcaaatgtctggtgcaattccgtatttgctctcaacagtatcatagacgcaacctcacttctcatccatcgctttctaccaacagtatactcatatatgaggcgtttttcaaatctcgcgtgcaaaaaatattttttttcaagaaaccatcccctcactttataaacttttaataattccgctgtttccctgtttttcagccttccgggaatattgttagcactcatgtgaaaagagtgctgattttgtattgactttttggaatgacggatataaactcttatttaaaagggaatgacgatgttactgtcgtcttccgttctaccgtacatattttatttttagataaaggagtgttttattatggcaaacaaacatggaagtctttcaattgacagcgataacctgtttccaattatcaagaaatggctgtattccgaccacgacattttctatcgtgagttgatcagcaacggctgtgatgccattaccaaattaaaaaagttagacatgatgggcgagtacacgctcccagctgatttcaaggcaaagatcagcgtcaccgtagaccctgaggctaagaccctgacatttaccgataacggtcttggtatgacggcagacgaagtcgaggaatacatctgccagatcgcattttccggtgcgaccgatttcatccagaagtacaaggacaagtccacggacgatcagatcatcggacatttcggactgggcttctactccgctttcatggtagcggacgaggttgagatcgataccttatcttataaggaaggcgccacaccggtacactggacctgcgacggcggtaccgattacgaactgaccgacggcaccaaaacaacgatcggtacacagatcacgcttcatctgaacgaggactgtctcgaatttgcaaacgagtaccgtgcacgcgaagtgatcgagaaatactgctctttcatgccgaccgagatctaccttagcaaggcaaatgccgagccggaatacgagaccatcgacgctgctgacaagcgcgacaccgatacggtcgtggaggagattcacgaggaggcaaagaccgaggaaaaagagaacgagaatggtgagaaggagacggtcgagatctcccctgccaaggataagttaaagattttaaaacgcccggttccgctcaacgacaccaacccgctgtggcttaagaatccgaacgactgcaccgacgaggaatacaaggcattctaccgcaaggtattcttagattacaaggagccgctgttctggattcacctgaatatggattatccgttcaacttaaagggtatcctttacttcccgaagatcaatacagagtacgattccatcgagggaaccatcaaattatacaacaaccaggtatttatcgccgacaatatcaaggaagtcattccggaatttctgatgctcttaaagggtgtgatcgattgtccggatcttccgctcaatgtctcccgctccgctctgcagaatgacggattcgtcaagaagattgaggaatacatcacgaagaaagtggctgacaagctgatcggcatgtgcaagacagacaaggaatcctacgagaaatactgggatgacatcagtccgttcatcaaatacggctacttaaaagacaccaagttctgcgacaagatgaacgactatatcctctttaagaatctggatgacaagtaccttacccttccggagcttctcgtaaaaaaagaggagaaaaaggaagacgccgatgctgcttccgatgttgttgacaaggacggcaattccgtcacagaggatgctgatgcaaaggacgattccgaagagaaaaaggacgagcgcaaggtcatctactacgtgaccgacaaggtacaacagggacagtacatcaagctcttcaaggagcagggaatggacgctgtgatcttagaccacaacatcgatacctccttcatctcccagttagagcaacgcaacgagcattataaattcatgcgaatcgatgcggatgtcacagactccttaaaggatgcaaacgatgccgctgatttaaaggaagagaccgacacgctgaccgacctgtttaaaaaggcacttggcaacgacaagctgaccgtcaaggtggagaagttaaagaatgagaatcttgcttccatcatcactctctccgaggaaggcagacgtatgcaggatatgatgaagatgtacgctatgggcggcatgggcggtatggacccgaatatgttcgccgcagaccagaccttaaccttaaacgcgaaccatgcactggtcaaatacattttcgagcacaaggattccgagaacgttccgatgttctgcgagcagctctatgacctggcaatgctgtccaaccagccgttgtccgtcgatgccatgagcaagttcgtggagcgcagcaacaagatcatgatgcttcttgccaaataaatcaattcgtcttctcacagacagcaggatggggcgcgaaattcactctatgcgggtgaatttcgcgccccgtcctgctttttctatcggaaaatcccttctctttcacataattttcacactgttaattgaggtgcgcagctatgaggatcttgcagcatctgtctcctatctgaaggaacatcatctccatccgttcgatgagacgccctgatgctcatgtgtgataaagtaacacaactaaaataaagaaagacagcccactattccgtaaaataatggagtaatagagaaaacgttttttctatgctaaaataggcatataaagtagaatgacaatcaagatatacaagaaagcacttaaactctaccgtttgtcatgtaattgtatagcttacttgctagagtgcaaatgagtattttgataagatttatacacaaaatcaaaaggaggaacacatatggagttcgcagaaaaacttataacactacgcaaaagtagagaattaacacaggaacaactggctgagcagcttaatgtttcaagacaatctatttcaaaatgggaaagtgggcaggtcatacccgaagtagaaaagattgttgaactaagcaaagtattcgacgttaccgtggattatctgttaaaaccatcagagatagatgaattatcggttaaaacagaaattctggaacaacaacagaaacagatgttagttagggaacagaaacgcactcaaatttccaaaaatattatgtattcgattggaatttatttgattttttttgcggtctatttcattgggcatttctattttgaaatatggaatgcttctgtaattcttgcggaattactcattgcaaccgcgattgtagtttttgttttggtaaggagtttttccgacaaatcataaagagatagaatttgtagcaaacccagccgagcctgtcaacggtcaagatgaacggcgcaaaagcgccgccgttgacagccccgcccgtctttgctgttcggtaatcaagagggcgacagcacaaaatgctgacgctctctgccattatttagaaagggggattttccatgaccgaacacgaaaagtatcaagagcatatccggcatacacacgatgttttttgcaagaccgtcattcggcatgctgccatagacgcagcccgaagcatacgcagccgccgcaagcgggaaatctcacttgaatatctgatagaagaaaagcactatccattcagtaccatagataagtattttgcggagcaagctgccatgaacagctatccttttttcgtctgcggtcagatggtgcttttggaaagtccagagcttgccacagctctgtccgcactatcacagatggaacaggaaatcattttcctatactacttccaacgatggacgcatagagagattgggcagagatatggacggtcaggcaacacaaccgggcggcgtattcagatgattttgcggcagctacgggcaaagttggagggcttgtcctatgagccagctacttccctatgaaacaatcgttaaggcaagcgagggcgacccggaagctgttgccgccgttctatcccattatgccggatatatccgctcttgtgcgaaaatggacggacagatcaacacggatatgcaggagcatatcgtcgggcgactgatagaaagtctgttgaagttccgctttgaccgctgataatttaataccgcaataccgccgcccatcacagcggcatataagcagtaaatcttgaaaaaggtttgctgcttttttgcgcccattttcaaaaatctttggcaaaccacaccaccggattgttgtagggagcagacagggaaaacaaaaaaatttccgctgcatttgccaaaacgcacccttttcaccgttgtagtggtgaacagcgggcagaacacgccgctgcaatcgctatattggtggaacaagccagtatatccgcaaaccagagccgccgaggaaagcggcagttttttagagcaagattctaccacggtgccaaaatctgcatatctgcggttttgccccctttggtaaatcttgtttgggagtgccttccccaaaccctgctcatgcgccctgtcgggcgagaaaggaggtcaacgcttgaagaaaaaatacaacacgccccaccgcagccatgtggtcaaaacccgcatgaccgaggaagaatatgccgacttcaccgagcggctgaaacactatgacatgagccaagccgagtttatccggcaagccattacacgggcaaccattcgccccattgttaccgtgtccccggtcaatgatgagctgctgtccgctgtcggcaggctgaccgccgaatacggcaggatcggcggcaacctcaatcagatcgcccgctttctcaacgaatacggaacaccttataacgcgctgtccgttgaagtccgcgccgccatttccgaccttgccgccttgaagtttgaagtcctgcgaaaggtaggtgacgctgttggcaacattcaagcatatcagctctaaaaatgctgattacggtgcagccgagcaatatctgacctttgagcatgacgagtttaccatgaagcccacccttgatgaagcgggtcgtcttgtgccgagggagaattaccgaatcgccacgctgaactgcggcgaagaagattttgccgttgcctgtatgcgctccaatctccgctacggcaaaaatcaaaagcgggaagatgtgaaaagccaccactatatcatttcctttgacccacgggacggcccggacaacggtttgaccgtagattgggcgcaggcattgggagaggaattttgtgccgagcatttttccggtcatcaagccattgtctgcacccatccggacggacacaaccacagcggcaatattcatgtccacatcgttatcaattccctgcggatcgaggaagtccccttgctgccctacatggacagaccggcaaatacccgcgccgggtgtaagcaccgctgtacggacgctgcgatggaatacttcaaagccgaaatcatggagatgtgccacagggaaaatctctatcaaatcgacctgctccatggcagcaaaaaccgcgtgaccgagcgtgagtattgggcgcagaagaaagggcagcttgcccttgacaaagaaaacgctgctgcgcttgccgccggacagcccgtaaagcagaccaagtttgaaaccgacaaggcgaagctgcggcaggccatacgggatgccatgcgtgaagccgccacctttgacgagttttccgctttacttctccggcagggtgtgaccgtgaaagaaagccggggacggctttcctacctcaccccggacaggacgaagcccgttaccgcccgaaagctgggagatgattttgaccgtgctgccgttctcgcctttttggagcagaacgcctacagagccgccgaacagactgtccccatacccgaataccacaccacagaaacaaaccgcacagggcgagggaaaacgcagaaaatcaccccgacaagtaccattcagaaaatggttgaccgttccgcaaaacgagccgagggaaaaggcatcggctatgaccgttgagcggctgtccacaacctcaaacagatggcggctaccgttgccgctatggagcagtacggctttaccccggaggaactggacgcagcccttgtatctgccaatgcggacttgcagcgcagcagcgccaagctgaagcccattgaaacggcaatctgcgagaaaaaggagttgcagaaacaggtgcttgcctatgctaagacccgtgatgtgcgggacgggctgaaaaagcagaaatccgataaggcacgccgcgcctatcgggaaaagcatgagagcgactttatcatagcggacgcagccacccggtatttcaagcaaaaaggcgttaccaagctgcctacctacaaggcgctgcaagcggaaatcgagcagcttaccgccgagaaaaacgccctttataacgagtatcgggcaaataaagcgcgtgtcaaggagctgcataccgtgaaaagcaatctttctcaaatcctgcaaggcgagaaagacagagagaaaaagcacaaacatgagcgttaaaaaccgccccgaaacgataccaaaacggggatatgccctgcaccctatccgcaatactgcccacctttgaaacggggcgcacagcgcaggaaatccccgaaaatgacaccgagaaactacatttttaccgacctatccgcttataccagcggaaacggcagaaaggagcgagaaatgccacgcatgagcaaaaagcggcggttggaatggagctttttcctcaaccaccgaaaccgtattacctacaatgacctttgccggggctgcacacacggctgcaagcagagcttccgggcgattatcgtcctctgcccccggtatttctctaagagatggaaacacagggaggacaccgccaatggcagataaccgcaaatattactacctcaaactgaaagaaaacttcttcgacagcgattccattgtgctgttggaggacatgaaagacgggattttgtattccaatatcctcttgaagctgtacttaaaatcgctgaaaaatggcggcagattgcagcttgacgagcatatcccctataccgcccagatgatagccacgctgacccgtcaccaaatcgggacggtggaacgggcattagccatcttccagcagttagggcttgtggagcagcttgactgcgggctgctttatatgaccgacattgagctgatgattggtcaatcctctaccgaagcggaacggaaacgcgccgcaaggcttgaaaataaggcacttttgccgccgcggacaaatggcggacatttgtccgacattcgtccaccagagatagagataaagaaagagatagatatagagttagaaaaagagggagagttaaagggacaagccctcgcccgcaactatggcagatatgagaatgtatttctgactgatacggagctttccgaactgcaagcggagctgcccgaaaaatgggcgtactacattgagcggctttccggctatatcgcgtccacgggcaagaaatataaaaaccacgccgccactatccgcagatgggcggcagacgataccgcaaaggctgccccgaaacagggcatacccgaatacacctgcaaggagggcgagagcttatgagtaatctgtttacagaacgagttttgaatatggcggctgttaccccacagccggaggactacacgggcgaggacggactgctttactgcggcaagtgtcacactccgaaagaagcctacttcccggaaaagcaagccgccctgtttgggcgtgaccggcacccggcagaatgtgactgccagaaagcccagcgtttggagcgtgaagccgccgaacagcgcagaaagcaccttgacaccgtggaggacttgaaacgccagggatttaccaatcctaccatgcaggaatggactttcgccaacgacaacgggaaatgcccgcaaatggagattgcacacttctatgtggagcattgggaaatcatgcgcgaggaaaatatcggctatctgctatggggcaaggtcggcacaggaaaaagctattttgccgggtgtatcgctaatgccctcatggagcaggaagtcgctgtccgcatgacgaacttctctgcgattttgaatgacctgaccgccagctttgaggggcgcaacgagtatatcgagcgtctttgccgttttcctctgcttatcattgatgattttggaatggagcgcggcacagagtacggtttagaacaggtctacaatgcgattgacagccgctaccgcagccgcaagcccttaatcgttaccaccaatctgacattggacagcctgcaaaatccgctggacaccgcccatgcccggatttatgcccgccttttggaaatgtgcgcccctatcctctttacgggagagaacttccgccgtgaaacggcgcaagccaagctgaacagactaaaagaattgatgaaatgaaaggagttgcctatggcagagaacaagcagaacaccaccccggaacgccgcccggactgcgtgacagagatccgcatgggcaacaccgtccttgtcgtttccggctttttcaaaaaagataccaccgacaccgcagccgataagatgatgaaagtgctggaggcggaagccgccgcaggacacaaagcccagctttcgccctaacgctacaagccgcacagaaaaatcgtcattttaccgggcggtaaagaagcagaagccgctatacagacagccgccccatgtggtataatcgaaatactgaatagtggggctggctgtcggaaacggaggattttatgttaagacagaccacccagaaaatcactgccctttatccaagactatcccatgaggacgagctgcaaggcgaaagtaattccatttccaaccagaagcgtattcttgaaacctacgcaaagcagaacggtttttccaatctgcgctggtacacggacgacggttattctggtgcgaactttcaaagacccggttttcaagccatgcttgcggacattgaagccggaaaagtcgggacagttatcgtaaaggatatgtcgaggttagggcgaaactacctgcaagtgggaatgtacacggaaatgattttcccacagaaaggtgtccgctttatcgctatcaatgacggagtggacagcgcacaaggcgacaatgactttgccccgctgcggaacattttcaacgaatggctggtgagagatacgagcaagaaaatcaaagctgtaaaacggtcaaaaggtatgagcggcaagcctgttacgagcaaacccgtgtatggctacctcatggacgaggacgaaaatttcatcattgacgaggaagccgcacccgtggtcaagcagatataccgtctgtgccttgccgggaacggtccgaccaagatagcccgtatgctgaccgagcaggaaatcccaacgccgggaacgctggaataccgcaggacgggcagcacacgccgctatcaccccggctatgagtgcaaatgggcgacaaataccgtggtgcatatccttgaaaaccgggagtacatgggctgtctggtgaacttcaagacggagaaaccgtcctataagactaagcacagcgtagaaaatcccattgagaaacaggcgattttcgagaaccaccatgagcctatcattgacacccagacatgggagcgtgtgcaggaattacgcaaacagcgcaagcgtcctaaccgttatgatgaagtgggcttgttctctggtatgctcttttgcgcagactgcggcagcgtcatgtatcagcagcgttaccagactgataagcggaaacaggactgctatatctgtgggaattacaagaagcgtacccatgactgcaccgctcattttatccgcaccgaccttttgactgcgggcgttctctccaatctgcgaaaagtgacgagctatgcggcaaagcatgaagcccggtttatgaagctgctgatcgagcagaacgaggacggcgacaaacgccggaacgccgccaagaaaaaggagttggaagccgctgaaaagcgtatcggtgagctttccgccattttcaagcggctgtatgaggacagcgtaagcggacgcatttctgacgagcgtttcacagagctttcggcagactacgaagccgaacagcaggaattgaaagagcgtgttgccagaatacaggcggagctttctaaagcgcaggaagccaccgtaaacgcagaaaagtttatgaacattgtccgcaagcacatgaactttgaagaactgacccataccctcttgcgtgagtttgtagagaaaatcgttgtgcatgagtgcagctatgacgcaaacggcacacgcagacaggacattgagatttactattctttcgttggcaaggtggacttgcccgaatgaccgcccgccctatccgataccaaaggcaagtatcggataggaacggcaaaattttttacacttctattgcttctttatcacacataagcaaacacgcagggcatctcattttacgagacaacaagggcaaaatatccccagtcccagatcagccgctcaaagctgttctccaggtattcccagatatcctcgtcttcatatcccagcatgcgcgacagaatcaccatacaactgcgcatgatctcataggaaagcgcgccctccctgtgccagcacagaaacgctgcatgccggatggctgcatactctaatgcaatccactgcagctttaccgtcacatactcgacgtcgtccggctcccccagacactccgaaaaaatctctgactgcagatagcaccgcatcagtgcctcatatggagaaaatgcctgcgcaaatgcatcgagatcttccttacggatcttcccgtaatcttccgcgatctgttccgcttcctctgccgccggtgttaaaaaagcacggtacagcccttccttccggtagttttccgccagatccagaaacagctcattgcgctccacaaatgccgcccggcaatccgccccggcatgctccaccgcatcggcaagttcttttctaaaaggcgcatccccgtatttggggacttccgccttccatgaagttcccgcgtcgcacagatcaagcgccatgtaaaacagcatgcaaagactctgtgccggccggtacgcacggtctgacatgattgtgaggaaacgttttctcaccccatacaccgcttcatatgcgccgtaggagacactgtctgcctcatccgaaaaccggatgcactcccgcccccaaagcagatccacgaccgccggacagcagggcatcagagaatattccgtgatccccgccgccacctcatgtttctcgcgcggaaacagcgtacaggtctccgacaaaaccgcatccccgtaggttaaaaccagccggcagagctttctctcatccagaaacggacagcgcattttttcatcgagcgtaatgattcgtccatccccgcatttttttgtataatcagataaggtccgtcttttcggacagaccccttccggcgtttctgtttttttccatgcagcagccgtcttacggtccaccgcaatcttccattcctgacagcatgtcagactgcacgcatccgcgatgcattgaaactcatcataataatcgggcttcatttcgttccccctcatgtcattctgccggcctcttatcagagaatcttcgtcgtccacttcgagcagtcccagacctctcccacgatatcctggtaaaactccggctcatggcagattaacagaaccgttccgcggtactcctttagcgcacgctttaattcttccttcgcgtccacatccagatggttggtcggctcgtctaaaagcagaacgttggtctctcggttcatcagtttacacaaccgcaccttcgcctgctcgccgccgcttaagactctcacctggctctcgatatgctttgtggtcagaccgcatcttgcaagcgccgcacgcacctcatactgggaaaatgccgggaactcctcccagatctcctcaatgcaggtgcgcttgttctcccccttgatctcctgctcaaagtagccgatcatgaggttctcgccctgctcgacaccgccgccaagcgcgggaatcagacctagtagactctttaaaagtgttgtcttgccgattccgtttgcaccgatcagcgccaccttatgtccgcgttccagtgcgatcgaaagcggcttcgagagcggctcctcatagccgattaccagatccttcgtctcaaaaatatatctgccgggcgtgcgtcccaccgggaaggaaaactccggcttcgggcgctccgccgcaagctcgatgacgtccatcttgtccagctttttctgccgcgacatcgccatgttgcgggtggatacgcgcgccttattgcgcgccacgaaatcttttaattcactgatctcctgctgctgtttgcggtatgccgcctcaagctgtgccttttttaccgcgtagacttcctcaaacttgtcgtagttgccgacatagcggtcgaggtgctggttctccatgtggtagatgatattgacaacatcgttcaaaaacggaatgtcgtgcgagatcaggataaacgcattctcgtactcctgcagatagcgtgtcagccacgcgatatgctccgcgtccagatagttcgtcggctcgtccagcagaagaatgtccggcttctccagaagaagctttgccagcagcaccttcatgcgctgcccgccgcttagatcggtcacatcatggtgcagcccgagttctaagagtccgagcgctctggcaacctcctccacctttgcgtcgatcgtgtaaaaatcatgcatcgtcagggtgtcctgtatcacgccgagttcttccatcatggcatccatctgcgactcgtctgcctcgccgagcgcatcacagatctgattcatcttctcttccaacgcaaacagccacgaaaatgccgactttaagacactctcaatcgtcattcccgcggtgagtgtcgagtgctggtcgaggtaaccgacccgcacatttttcgcccactccacttttccctcgtccggcatcagctttcccgtaacgatatttagaaacgtcgactttccctcgccgttcgctccgacaagaccgatatgctccccctttaacaggcggaaggacacatcgtccagtatcacacggtcaccgaatccatgcgtcaaatgttctacatttaaaatactcatccgtcacctctatttcagcagaaaaaagtacaaaagtaccaccacgccgagcccaatgcggtaccagccaaacactttaaagtcatgctttctgatatatccgagcaggaacttgatgatgacaaccgacaccagaaacgcgctgaccatgccggaaagcagaactgcccactccgtcccggtcagatgaagtccgaaatccatcaattttagcaggcttgcaccgagcatcaccggaatcgccagaatgaacgtaaactcactcgcagccttccttgacacaccgattaagagcgcaccgataatcgttgcaccggagcgcgacgttcccggaaacgcagccgcgagcagctggaacaaaccgatcagaatcgccatctgaaacgtaatgtcccgcatctgctccacacgcgcctgctttgctgcattgtgattctccaccagaataaaggcaacaccgaacacaatcagtgccaccgccacacacaccggattgtaaaacagtctgtcgcaggtctcatccagccccagcacaacaaatacgattgccggcaggcaggacaccacgatcttgcaccagttgataatgaccggcatgcgcaccgtgacgggacctaacacccagtattccctttttacaagggaaccgctcttctcattctgttctgcggccacgaccgcttccgaggaactgcgtgcaaacggccagatcagattccagaacagcaccacgaccgccaaaatcgctcccagctggatcactaccagaaacatatcccagaactgtgcacttacatccagtgtcagaaactcgtttaagaggatcatatgtccggtgctgctgatcggcagccactccgtaattccttctacaataccaaatataattgcctttaaaatctctgtcataaatactccattcttctcataactgctatgcatcagccgctgccatgccacgctcagccggtaccatgcagacatgtcatgccacactcaaccggtaccatacatacatgctatgccacgctcgtgcggacaggctcgctcaacattttcttcgtcttcttcaacacatggaaatatgccgggaacaggaaacagtcggcaaaaatccatgcgaccgggcttgcaaagcacgctgccggatagccgaacatcggaacaaacacaaatccgaccagggtacgcgccgccatctcaaagacgcctgccagaattgcaaacttgctgtatcccataccctgaatcagaaaccgcacaatattcacgaaagccaacggaatgtagaaggcactgttgcataccagaaacagccttacatttgcaatgacctccgcctgtgcactctccacgaaaaacatggcaagctgattgccgcaaagccacagcaccacgaacgccaggatcgaatatccgattcccagaattcccgccgcttttaatccgccgctcaagcggtctaacttcttcgctcccacgttctgtccgccgtaggttgccattgtggaaccgagcgcatcatacgggcagcagaagaacataccgatcttgcttcccgccgtcatggatgccacggcattcgatccgagcgtgttgactgcgctctgtaggatcacgctgccgatcgcggtgatcgaatactgtaatcccatcggcacacccatgccgcagagggttttcatgtagcccttattcactttccgctcttcctcatcggtgtgcagaatctcaaactttctcttgctgtagatgacgcacgcgataccggaaaatgcctgcgagatcacggttgcaagcgccgctccggcaactcccatcggaaatacaatgattaaaagcagatccagtccgatattcacaaatgctgccagcgccaggaaaatcagaggcgtcttgctgtcacccatcgaccttatcacgccggacaccagattgtacagataggttgccggaatccccgcaaaaataataacaatgtaggtgtaggcgtcatcaataatattctccggcgtctgcatcagctgtaagattggccggcagaatgccaccgtaaacaccgtcatgaccgcagaaaagatcaccgccagatagactgcattcatcataaacgcacgcattgccttataatcgccggctccaaaccggtgcgccagaggaatggcaaaaccgttgcacactcccatgcagaatccaataatcagaaagttcagcgaaccggtcgatcccactgccgcaagtgcatccactcccagaaatcttccaacaatcagggtatccaccagattataaaactgctgaaacaaaaatccaaacaacagcggcaccgaaaatcctaaaatgagcttcatcggtgaaccgcttgtcatatctttcgtcatagaatctacctcatttcatactgtatctcagatctcaccgcaatacttctcaaataccgcaaaaaagctgttcgtctgaatactgccatccgtggtaagctcaattccatcccacagatccgtgttcagcctcgaggataacgatgcgacaaattcattgtagacatcgtcaaatgcttctttttcacgtttttccacaatgttggacttattcgcttccgtcagctcttcattatatttattcaggcacttgataaaatagtatccatttccggcagcgatcattccggagacggcattgtcgtccagctgaaatgccacctcctccacctcgtcgggcagatcatccctcgataccgtcacctgaatcgccgacaattcgttataattgttggcgacggaggcaaaatcatccccctgcgccagcttctgctccacctcgtgcgcccggtcttcgtccgtgacataaatctgcatgatttccatcacgcgcgcctcatcgtcgctgacctcctcgttgacaccgttcgtcagcgaatgatacagcttctgcgccagcgcatagtgcgtataatactccgcaatatccgcctcggcgacgtccatataggcggtctcatcctccgagagggatgcataatattccttcgctgcttccgccaccttcgcagtctcatcctctgagagggtcacctcctgcgactgtgccagcagatccatcgtgtatacacgggtgagctcctccagcgtgatgtccttcacatattcaagcagggatgcgtctccgaaatcgtgctgccagaggtcaatcgtatatgctgttccatagatattctgataatttgccagatatacctttgcctcctttaagctgcatgcagacttgtccagtgtaaacacctgcctgctgcttaacgttcccgagaccacaatatctttattgccaatctggcatcccgtaagagccattgacagcgcgcatgcgcacgctgtcattcccatcgcccatctttttctcatcgtgaaacaccctttatctcaacgtctacatgatatttttcaagatacttctcgccacggaaattccgttcgcggatgcctgctgcagtcctctggtcacggacgcgccgtccccgatcgcacggagtcccttgacactcgtctcaaagtcagaattcaccactaccttattggagtagaacttgacctccacaccgtagagcagcgtctcatcacttgcaatacccggcgttaccttatcgagagccatcagcatctcctcgatatccaccatgatccggtgcgggaataccagggaaagatctcccggtaccgcatcctttaaggtcgggatgaggttgttgcggcacaggcgttcctccgtcgttcttctgccgcgtttaaagtctccgaatgtctgcaccagtatcttgccgtcacagagcatattggagagctgtgcgatctgcttgccgtattcgatcggcgtcttaaaaggcttcgtgaaattcttcgataccagaatggcaaagttggtattgttggtctttaaatccttggacttgtaggcgtgtccgttgaccaccgccagtccgttgtcgtagtattcggttgcaacctcaccggacggattggtacagaaggtacgcaccttatcatcgaacgtcggcgtatggtacactaacttcgcctcgtagaggttctcatttaaaaattccatcacctcatcacgcacctcgacacgcacaccgatgtccacagtgccgaccttcgtctcaatatcatgctgattgcagatatgggagaaccagtctgcgccctcacgtcccacggcggagatgacctctgctgccgtgtatgtctcatccttgtcggtaatgatacccttgacctggttgtcctcgatgatgatgtccttgaccatagtgccaaactccatctccacaccttcctctaacaggtgctcctgcagtctggagtagatcttgtagccttcctccgtgccgagatgacggatcgggcattcgatcagctttaagttcgccatgatcgcttttctacggatctcgcggatttccttctctttatccacaccgtacaccttggaatccgcaccgaatttcagatagatgtcatccgattcctttaagagttccaccgtcttgtcatagcctaaaatctccggcaggttgccgccgacatccggagataaggacagcttgccatcggaaaaagctcccgcaccggcgaatccggtcgtgatggaacacggcttgcatcccacgcacaccttggtcttacgcttcggacattcacggttctcaatccgtcttcctttttcaatcattaatactttcagatcctttttcgcatgaatcagctcatacgcacaaaaaattccggaaggaccggctcctataatgatcacatcataattcttcattacattccctcgttctttctatgtattctaccattctgttatgtatcttcctgcgttctccaaagcagacggcttaagcttccacgatcaggtatcttccgtccggcagtgcgaacacttctgcctgctccgccagatcctcgctgctcattccggcgatatccgcaccctcttccttaaagtacgcccgcacttccttcagattctcacagaccgttgcgaaacagtccgaaagaaattcctccgcctcttccctgctttctgccacaggttcccgaaacagcttctcctgctgcgccaaaaatgtatccaggcacatttcatcgtacatatcttttcctccgccaacgttttattttaccataaatagatatcaattccaagcttctttaattcccggtaaatggctgctaccggaagccctacaacattattatagtcgccatcgattttgtcaacaaaaatcgcacatttcccctgaattccgtatgcgcccgccttgtccatcggctcgccggtggcgacatagcgccggatctcctcctcgctcatcgcgcgcatcgtgacatcggttttctcatgaaacgtcacctgaccggcctttccggacgcatccaaaagcacgatcgatactccggtgtatacctggtgtgtgccgccggagagaagcttaagcatgtggcaggcatcacgctcgtctttgggcttccctaagatctgtcccccgcaggagacaatcgtatcggcaccgatcaccatgagatccgagggtgtcaccagttcctgatgcgtctccgcgtaggttcttaccatggatgccacctcgatggccttctgcgacgccagttcctccacgacttcgtgcggtacgctcttcgtgatccgctcctcacctttggccgggcagatttcaaacgaaatcccgatctgctctaacagttcctttctccgcggtgaggcggatgccagtatgatctgtcccatctctttttcttcctttctgatgttcttatctctgaaatctatcgtttcttatgttccatttacgttacaccggtatcactgcgcccagccggaacgaatagagaagccgctccttcacgcgaagcgtcctctcgctcccgtggttatagatccgctccagcgcctcgccgtaaagctttaactgtgaagcataacggtccgccagttccttttcgttttttacccggtccgtcttataatcaagcaccacaatgccgtcctcctcaatccagaacacatcgatgattccctggatcagcgtcagctctttgtcatccgcacatttctctccgtctccgaatccaaacgcagcgagctcttcgcccgtaaatcccatcacaaacggtttctcccggtacagtgttccggcaagttccgcacgcttcatccgctctcctgccgacgacgcgaggaacgtttcgatgagagccggttttaccaggcgcttcatctcctccgtgatctgtcctccggcaagcatcgtctcgatctgttccgtaacacctgccgctgcagaaaaatgataacactccatcaccctgtgaaccgcagttccgcgcaatgcgccctgattctgtccgccgttttcttgctgttccatttttttttggacaaacggcggtacataggattttccctccgtctctaaaaacgccgggataacatccttctcctcctccaggagtttttcccgcatcgcgcgatgttttaattctgacacggaatatttgtttttgcgctccagatcgcgttcgtatggataggtaaatgagaactttccgtcaaattccgccacatctgccgcatccgccgctgcaatgcgtgacagacactgttccagattctccgtctccacctcctcgcgctggcactcttcatcaagcaattcctccgccggcacaacgcgcacctgatagcgtccgtgataggagaacactgccggaagcagccagtcgaaatagccggctgcgctctccctgagcagataaggaagcgggacatgcaccgtttccgtaaacagctcctcctgtgcctcttcccttaatgccgccagatcattttctgcatcctttctgcaccccgttaagatcagcttctcctttgcacgggtgagcgccacatagagcacacggagctcttcacccagattctccagttcgatctgctttgcgatggcgcgttttaatatggtcggcgtcttgatcctgcgctcgccgtcgatccagtcaattccgattcccagttccgggtgcagcaccatgcggcttctggtatcctgcttgttaaaatttcttcccagaccgcacacaaagaccaccgggaattccagtcccttactcttgtggatactcataatgcgcacgacgtcctcattctccccgaccatgtccgcctcaccaaaatcgacatcgtatttctggagttcatcgatgtagcgcacaaaatgaaacaatcccttgtagctcgtattctcataggcgatcgccttctccaccagcatgcgcagattcgccctgcgtctggctcctgccggcatcgccgccgcataatttccgtagccgctttccttcaacacgatctcgatcagctcgtgaatcggggtgtccggcacaagcgcccgcagcctctcatacagcttccagaactcccacagttttttctcataaccttccgccaaaggttcttcactctgcgcaagttccctgcagcgtgcgagcacacactcacagaaaggcacgctgcggtcgtgcgccctaagccgtcccagctcctcgtccgtaagcccggcgatcggagacttaagcactgccgcaagcggaatatcctgtctcggattgtcaagaatccgaagcatcgcaagcaccgtctgcacctccaccgccgagaaatagccggttgctgacaccgtatgcgccggtattcccgcctcgttcaacacggcagcaaacgaatcggcatacccgcttaggctgcggagcagaatcacaatatcgctgtaacgcacggcgcgcagttcccccgtcgccttgtccgtcaccttctgctctgtcatcagcttccggatgcgctctgccacaagcttcgcctcatacagcttccggtcttcgtacccgctgccctctaagagttcttcggcactgtccgccacaagaatctccggtgcaaacatccctgcctcatgcggcgcacaataatctgcgcccgcgtagagcgccgcatcctcatcgtatgccacattgccgagatcgcgcgccatgatccggtaacacacatcgtttgtcatatcaagcacctctgaccggctccggaaattcctgtgcagatcgatgcgctgcgtactgctttcctccagcgtgtaggtatcgtatttttccataaaaagctccggtctcgccagacggaagcggtagatactctgcttgacgtcccccaccatgaacaggttgtacgctccgcgctcctctcttgagatcgccctaagaagcgtctcctgcacatgattgctgtcctgatactcgtcgatcatgatctcctcgtacatgtcgcggaactcctccgccgcagcgcgcgcctgctttgtctttgcatccacgagaatctccagtgcgaaatgctccagatcgtgaaaatccaccagattcttgcggcgcttttccgctgcaaacgcctcggagaatgcgatggcaagacgcaccagttccttcgccatcggctctgcccggcgcacctgcccgcacatgacttccggcgatgcaaagaaatactgcttgttgatcttttttaccgtatccttcacctggtcgcggagttccttcacacgcgaaagcttccctgcatctcccgaaaagccgcggctcgacggcagtctgtcataagtgacggcggtaagcttttcgtacagctccagaaaattttcacacgccgccagtccctcgaactttgcgagatccgacgcgatcaccttctcatagatatccggtccgtcttcctcccgcgtaagcacatgcgcgatgcgaagcttttttaccagatccgccagcaccgaccgcagatgcagcacgagcggctgcatccatggcgcttctgccatctcctgcacatccgatatctcatagccacagatgccggaagtaagccactccatcggccacggatagctcatggagaactcgtagagcgagaggatcatctccgccaccttcgcatcgctcttccccgacacatacccttttgcaaatgccgcaaactccggtgacatctgttcgtaattgctctccagcacgccgcgcagcacgtcttcttttaacagctttaactctccctcgtccccgatccgaaaatccggctccaggtcaatctcgtggaaatgattgcggatcacatacagacaaaagctgtcgatggtcgtgatctgtgcattgtggattaacgtcagctggcgctgcagatgctccgaatccggatgctcctccagcgctttctcgatcgccgccccgatgcgctcccgcatttccgccgcagccgcattcgtaaacgtcaccactaaaagccggtcgatgtccaccggatgttctccctccgtgatcatcttgataatgcgctcgactaaaaccgctgtcttacccgaaccggcagctgccgataccagaatattgcgctttcttaaatcgattacctgttgttgttctctggtccatgaaacacccatctactgtctcttctcctcgttctgcgtctctctcattttcgcaaggatcgcctcggcaccgtccggcttttccagcttccggtaggaaaagcccggtatccgcgcgtcaaatccgcacaccatatggtacgggcagtagtcgcagccgcttctcccgtcgagttcatacggcgcagccgccacatctccgcccaggattcttctgcccgccttcgtcacggtctccttcacatagtccgatattgtcccaaactcttccgtactcgccgtcttggacgtcgcttttaaggaaccgtccgctttaagcgccaccggaatgactgcggagcttccggaaagttctgtgtccatcgccccgtatatctcgggatcgtcgttgactaacccgttcggctttaattcctccaacacggtctgccggatctcctcctccgactctgtgccgctgccgtcgaccatgggatcctcaatgtgatagtaaaacattcccgcaggcaccgcccgttttcccggatgcttttttgcctccagttcgagcgccgcattcatataaaccaccagctgcagctgcagcccgtgatacagattcagcagggaaaatgtggtgttgcccgatttgtaatcaatgatctttacatacaccttatcatccgtctcacaggtatccacgcggtcaatcctgccccgcagacgcatcttttcctcctctgtcagctgaaaacggattgcctccagatgatcggcctgcgaaaacgacacctcaaaatcactcggcgtaaaacgccccttctgcacctggatcgtgagcgcccacaccgtgcgccggatcgtgtctttcatgcgcgacagcagatagcggttcttcgcctcgtcgaatgcgcccacattcgcgcagcccgcaatcgcgtcattcatgctctcctcaatccacgcctcacgcgtctgttcgggcagatcgtaccaggtatacgaagacctgcggatgcgctccgcaaaatgccacagcgcgtcatgatagatatttcccatatccacgccggcaaactcctgcagttcccgctgcgacagtcccagtccgtaggtcatgtaatgcgcaaacgcacactccgcaaactgctccagccttgtgacactgttctccagttccgtgccgtataaggcgcgcgcaacctcttttccgatcggctctccgctgtaacggtaaaaagatgccgcaagcaggcgcagcgccttcgcatgataagtctcatccgagagataccactttgcaagcgcctcccaggtatgtgacttttgttctgtccagagtccctccaacagataatcgatcccgctctccggcgttaaaatcgcggacgcctccgtctcctcctccggctcacggatctttagttccgggaacatattgcagagcgttccgatcagataagaccggcgcagcgcctttccctccggactgaccctcgagtaggtgacatacaatccgtccgacggcttggttaagttcagatacaggtaaaacttctggataaaaactttttcccgcgcccccggcgctaacatcagatgatgctccgccatcttctcgcgctcgaactgtgagatgatgcttccggtgctgccggctttcggcacgataccgtcattgacccccacaaagaacagaatccggatatgatttaatctggtgcgttcaatatctccaactgtcacacggtcatttcccggcggaatcataccgacctttgccgcagaaaatcctgcgtccaggatgtctgtgtactcccggatcgacatctgctcctccccgagcagtgacgtgaccttgtcaaaaagatccatcacgatcttataaatctgcccgtactcctgcgctctggtctggttcctgcgcacgccgttgtactctgtctcctccgcctgttctaagaggaactgcttctccctaagctgcgcttcaatgtccaacgcggtgataaactcatacagtccgtaggtctgctccgcaaccgtgtattttttcccggaaaaaagttcgcacagcggctcaaacgccagaacgatccgctcccgcgcccggttcaaaagagccatctcctcctgcgccgcctccggatagcgggcatcccgcttcatcacagatgtccacttctcactccagcgctttctgccgcggattccttttgcaagcacataattctccagacggtcaatcacatcctcatcatccgcccaggctccaacgccgtcctcatctgctccggctttggctttggcgccgtccttatcattcaccccgcctctggctttggctcctgcgccgtcctcatctgccgtctgctccgtgcagctctccgtcagaagccgtcccgccagtccgctccgaagaaagcggaacacactctggtaggaaaaatcaaactccacgacctcaagcgccgcgcggataaactcgataaacggatgaaacagaatgtttctcgtctggtcgataaaaaacggaatcccgtactgcgcaaaggtctccggaacatagttggcatactgcggcacatctccggtcacaaccgcaaaatcccggtagcggcagccctttgtccggaccaggcgcacaatctcccttgcgacaaaagaaagctcctggcgcggatcctttaagctggtgatgctgatgtcattaaccggctttggccacttctggtacatcgggcggaacagattctgttccatgaaaaacagctccggtgcattttcatagcgcctgtgctctcccggctccataatcaccggagagagtacctcgcatcccgcatccgccgcaatcttaagcagtgtctgcacggtctccttgctcatggaaaaaagctcgtgcacgcctctgctgtggtaaaaatcctcccggatatccatggagagcgacacgatgacgcgatcggcaagcggcagcatcacccgaagcagccggttctggatcggggtgaatcccgtaaactcgtcaaagacaatcacactgtccctgatgagctcggattcctccgccacctcacacaagagtgtcagaatctcctccgccgtgatgtatttcccgtcaatatactcccggaatccctcatacatcgtaagaatatcctgcatcttacagcgcagggtatccccgacatcctgcccaccgagaaaagcaccaagatcctccggcgtgatattgtactgcgccatctccgagatcagggacttgatctcaccgatgtatcccattttgttgagattgccgccaagcaccgagagttcttttttcttaagctccgccaccttgcgcagcaccagattcttgcccgtctcctctaaaatgaccagatcctgcattccgagatcgtcgaacacacggtacgccagacgcacaaaactgagcacatccacgttcatgatggcatgattgggctggcgccacacaagttcgcgctgcgtctgcatcgtaaactgttccgggacaagcaaaaggaaattcttctccggttccctttccgcttcctccaatatcgactgatataaataatcggactttccgcttccggaattgccgaacacaaactgtaatgacataaaaaacgtgccccctgttcacagcaatattttaacacaggtgcacgcttcttccaaataatattccctctattttctcttaattatttctgatgtcagccgatatatatagtagagaaggaactcattaacccctatcagttgtgatttatttgtcaaggaggatgattgtcgcaatctactatgatagtgttttcgtgttacccgttcacccagtaaaccggatcgaccggcttgcaccagagagcagaaagcagcaacgttccaaacagcagccttcttcttcgttcgccacactgctgcatcaggcaatgacggtgacagaggaggaggatgttcattcgttcgatgccactgcctagagaaaggttctatgaatcagacaaaagaatttcataagaaggcccccggttgacaatccaaggtttcgtacctttccattgcgcccgggggttttcttatgcctgcaggcaggcttctcttttatttttcatacagaaattcttccggcagggtcacatgaaaatcctctgccagatgtctgaagtcgtccggctgtatcgtctggagcttatccggacgcatggagagcgtcttcaccagaatctccgccgatttttctgcggtgtgcatcagaccgaacgttaagtcaaagtcctcgccggcagcaaacatgccgtgatgcgcccagatcgcaagatcatattttttcatcagctcgctggtcgcaaccgcaatctccctgccgcccggaaccatccacggcaccacgccgacacccgccgggaataccaccggacattccgttgccatctcccagagttctctcgtgaatacgcgatcctccagtggaagcacgaacgtcagcgcaatgatattggtggtatgtgcgtgatagaccacgcggtacttcggattctgcagtttctttacctccaggttcatcagatggctcggcagctccgaggtcggtcttccgccgttcaccagtccccacacgatccggtagttctcgcctttttcgtccagctcaatcatgcagatcgaatcttccggctttaagatgacgttgcggaaatattttccacttccggtcacaaggaaatactctcctgccagattgggcaccgtggtgccgatcggctgccactccttttcctgaaagttctccctcaccgcttccacttcctccggtttcacgcggtaagataagtttccgccgtttctctcatgccagccctgctcccatccgtcgtttgccatgcggataaatccctgtacaaattctgcatccaaaaatttcatgattctcttcctctcttctctctgattcagcttctatctgcttatcctcttttggtcagtacctcacgctcgtaacgctcgatctcgtcgtagaaatgaaggtcgtcgcacacgccttccctgcggcagtattcctcccagatctcgccgatcggaagcatttttaccgcctcatgcataaccatgagttttcccagctgattcgtatcctgcagctcctttaacatttcattcggcgtgcacagtgccgttaacagggctttctgccagctccgaaagcctgttgcaagcgccaggacacggttgatgctcgcatcaaagtaatccagcgccatgtatacacggtcaagcgcatcgtttcttacgatctcttttgccatctctttcgtctcgtcatctaagagcagcacatgatccgaatcccatcgcacgcctctggtaatgtgaagcgcaaactccgggtaaaaacagagcatggcaggaatcttgtccgaaacatactccgtcggatgataatgtccgttgtccatgagcggcatacagccttcatgctgtgcggcgaagctcaatgtaaattctgccgaacccacggtgtaagactccacaccgataccgaataccttggattccacgcacggcttgacgagatttctgtcatacggttcggataaaatctgctcgatcgaatccttgcagcgcagacgcggtcccatacggtctgccggaacatccttaaatccatcccccgtccagatattcatgacgcacggcataccggtctcctttgcaaaatattctgagatgcggatgcatgcctttccgtggttgatccagaactttctggtctcctcatcggggcttgataaggtaagtccgtcttttactttttcgtgggagaaaaatgttgggttgaaatcaattcccatatggtgcttcttcgcaaattccacccactttgcaaaatgcttcggctctaaggcgtcgcggtccgcaaattctcccggctcaaaaatcgcataggacgcatgaatatttaattttgccgttcccggcatcagcttcattgcctcctccatgtcctccatcagctgctgcggcgttctggcgcgccccggatagtttccggtcgtctggattccgcctgtgagtccgccgtcattgtcaaatccgatcacatcgtccagctgccagcagtgcagcgatactggaacctttttcaaccgctcgatcgcgcggtctgtgtccacgccaagtgtctcatattttgcttttgctgcttcataacctgtcatctcgtttctcccttctctccttcaaacttctccattgtaaacgaatccgcaatgcatgctctcgccgcactgaggtcttcaaattctcccgccgcaatcatctgcacggcaaggttgccgagcgccgtcgcctccgtcggtcccgcctcgaccgtctttccggtgtattctgcggtaagccggtttaaatactgcgcattcgcgccgcctcccacaatgtgaatctctgggtactgttttcccgtcaacgcctcgatctcctctgccgtcccggcatagcactgcgcaagactgtggtagatgaccgccgccagttccccgatggtctgcggaacctgctcccccgcttcccgacatgccctccttacttcctccgtcatgttctccggcgccagaaatcgcgcatcgttgacgtcgatacgcgatgcaatcgtctcctttgcggcgcgcgcacagatctctccaaacccaagttccggcgcactctcctttcggacagactggatcatccagagtcccatgatatttttcagatagcggaaccggcagtcgtaaccgccctcgtttgtcatgttgtgcgctctcgccgcactgctgcaatccgccgtcatccgttcggttcccatgagcgaccatgtgccggagctgatatagagcgtctcttcctcctgcgttggcaccgccgccaccgccgaggcggtatcgtgtgtgggcggcaggatcaccttgcaggaaaatcccacttctttctggatctccccccgcaggctccccagttcataccccggcatccggatctcctgaaacaaccgtctcggatagcccagctgccggatcagctgctcatcccagtcctttgtcaccggactaaccagctgggtcgtcgtcgcattggtgtactcctgcacctttttcccggtcagaagaaaatgaaaataatccggcatcatcagcagacagtccgcctgctccagccattttggatgctgctcccttaccgcagccagctgatagatcgtgttaaagatctgtttttggattcctgttctgtggtagagttcttcctccgtgatatgagcatacactttttcatccatgccctgtgtcctgccgtcgcggtaggctgccgcatcgccaatgcgtcctccctgtccatccaaaaggacatagtccaccgcccaggtgtcaatccccatgctgtgcggaatttttcccagtctgacacactgcttcatgccgtttaaaatctccgcaaacagccgctcgacatcccataccttgtgcccgttcttctccgtcattccgttcgggaagcggtagatctcttccaataccagcttcccgtcttcctgatgggacagcatgtgccgtccgctcgacgctccgatgtccaccgccagataatacgtcgtctccatccccctgctcctttctctttccttctcatttctgctgtcagcataacaaaaataaggaccgttttttaggctctgattcgactaaaaaactgtccttattttccattctcaaatgttctctataattctctatgattttcatcaaggttcccggcatcacgtgaattcatcacgcggtatgcacgcggcgtcacgccgtaccggctcttaaactgccggaaaaaatagctcagattctcatacccgacatcgagcgcgatctcctccaccgccagatccgtctccttaagcagatgcgccgccgtctcaaatctccgctgctgcaaaagctccttgaacgtatcgccggttttctgccggatcagcttacttaacaccgagaccgactggtgggtatcttttgcgatcttcgtcagattcgcatttttgcagtcgctcttgatgtacccgagcaccgcctgcacgatcgtctcccggtaatccatcgaggaattgtggcttaaattctcaaggtgattcagaagatataaaaataccagtcccatcgtatactggttcatgacatcctcatcggaatgttcatgcaacatggattcgatcatattttccatgagattttccacctgcggctgctcctttaagcggaacagcaggtagtgcgataccggatttttctgtccgaaagcgccggcgataaattccgcaagcacatttttctcgtgcagcatggaaagcggcacctcaaaaaactccggcagcgcgataaaattgatgccgatatcctcatactctgccctgcggatagcatggcgcacctgctggttcaacatcagcacatcccccttgtgaagcgtcagctccttcccctcgatgatatgcgtgatgctcccctgcacgacatacatgatctccacatagttgtgccggtgctccggaaaatccacaaagcggctgtgcggacgcacggtgatgagccgtccccgctttaacagcagttcccggtcaatctccccgatcgactctctcgcatacagctgccgctcaaccattccctggcccgctctgtactttttttcttcctctgaaatgaccatcagttcgttaagaagttcttctctcatcgccgctctgctacccttctgtgaaactctgcgccccgcctgccgttgtcaccggcacgcctgctctcttctacaattatccacacagaccgcatccgttgtcaagtgtcagacttctccgaatgaaaaaagtggatcttaccaccgttttccgtgataaaatccacttttccttattcctgattatttgtttttatttttccagtccgaagcagtactttgtcaccgagcggtacgtatcacccgcttttaacaccggtgatttaaagttcttctcattcaccgcattcgggaaatactgcgtctcgagacagaatgcatggcgcctgtcgtactgcacaccacccttgccggtctgcggcgtgataaagttgccggtatagagctggatccccacacagtccgtatacacatccatgcagatgccggactttgcacctctggcacgcgcagcaagctgcatggtaccgtccgccttgtccagcgcataattgtggtcataaccacccgcataacgaagctgcgtatcgtccgcttcgatgtcccgtccgatctccttcatctcccggaaatcaaacggcgtcccggctacttttgcgagttctccggttggaatcgccttggaatcaatgaccggtgtatagtaggatgcgtgaagttcgagcttctgcccttccatcacgccggaatcatgtccgtccagattaaagtaggcatggttcgtaaagttcgccaccgtcgtctggtcgcagactgcctcataggcgatcgcaacctccccgttatcatccagcgtgtacgtaaccttcgccgtcatattgcccgggaaatcctgttccccgtcgcggcttacataggaaaacgtaatactctgtgcgctttcctgcaccacatcccagatcactgcgtgaaaaccgtgcgatccgctgtgcagattgttctcattgtcattcgcttccagcgaatagtcttttccgtccagatggatgtgtgcatgatcgatccggttcgcattgcgcccgatcaccgctccaaaatagcaggtattgttctgataatcaacgggtgtatcgtatcccagcacaacgtcatatatgtttccgtctgagcccttcattgtgatcgatacgatcgttgccccgagatcaatgacagagagcgtcattccctgcgcattgacaagcgtgtactccgtgacctccctgccttcctttgttctgccaaaactccgtttttgcatactgatcctcatttctaagcatatttattgcgaaacggcaggccgtttcttccgacgtactaattctgtccgtagtaggcatttgccccatgcttgcggtagaaatgcttttccttgatacaatccggcgccggcttcaccttcggattgataagctcagtgttgcgtgccatcttcgccacttcctccagtacgaccgcattgtggactgcctctgcggcatccttgccccaggtaaacggtccatgattcgcacagagaaccgccggtgtgtacatcggcttgatgcctcttgtctcaaaggtctcaataatcacaagtccggtgttcttctcatatgcctcgtcgatctcctccggcgtcagatttctggcgcacggaatcggtccgaagaaatagtctgcatgcgttgtgccgtaaagtggaatatctctgcccgcctgcgcccacgcgacagcctccggggaatgggtatgtacaataccaccgatctcctcgtactttttgtagagttcgatatgggtcgccgtgtcggaggacggcttatatctgccctcgatcttatttccgtcaagatccatgactaccatatcgtccgggcttaaggcatcataatccacaccgctcggcttgatgacgaaatagccgctctcgcggtcgattccgctgacattgccccaggtgtaggtgatgagccctctgcgcggaagttccatgttggcttcatagacctgtttttttaattcttctaacatctcttagtttcctcctgtgctgcgccgttctacttcatctcacgcaggatgcggtttgcgattccctctgcatccagttcgtatttgtgaagaagttcttttgccggaccggattcgccaaagacatcgttgacaccgattctggtaatctttgtcgggcatttttcaccgagcgtctccgccactgcagcgccgagtcctccgatgatggaatgctcctccaccgtgaatacacgccccgtcttttttgccgtctttaccacaagttcctcgtcgagcggcttgatagtgtgaatgttgatgacttccgcatgaatgccctgctctgccagcgtatccgctgctgccagtgcttccgaaacacaaagtccggttgcaatgatggagcagtcgcttccctcacggagcgtcacgcccttgccgatctcaaacttataatccgcgccgtcgttgatgaccggaaccgccagtctgccaaagcgcagatacaccggtcccacgtactcgtaggcagccttcactgccgcgcgcgcctcgatgtcgtccgccgggttgatgacaaccattcccgggatcgcacgcatcagggcaatatcctcgttgcactgatgggtcgcgccgtcttccccgacggaaattccggcatgtgtcgcaccgatcttcacattcagatgcggatatccgatggaattgcgcacctgctcgtaagaacgtcctgccgcaaacatggcgaaggtgctcacaaacggtacaaatccacatgtggacattccggctgccacgccggtcatattcgcctctgcgataccgcagtcaatgtggcggtccgggaatgccttcttgaacattccggtcttggttgccgctgcgagatccgcatccaggacaaccagattctcatgctctcctccaagctcgaccaaagcattgccgtagctctctctcgttgcaatctttacttctgacacaatgcttcacctgcctttctaagatcctccatcgccactgcatattcctcgtcgttcggcgctttaccgtgccagccgacgctgttctccatgtaggagacaccttttccctttacggtgtgcgcaataatcgcggtcggcattcccttcgtggctctcgcctcatcaaacgcccgcttgatctcatcgaaatcattgccgtcgatgttgatgacgtggaaatgaaagctctcgaacttcttgtcgatcgggtacggcgagcagacctcgtcgatcggtccgtcgatctgcaggttgttgttgtccacaatcacgcagaggttatccagcttgcggaaacctgcgaacatggcagcctcccagatctgtccctcctcgatctcgccgtcgccgcaaagtgcatacacacggtaatcctgctgtttcatcttccctgccagagccatgccgcacgctgcggaaagtccctgtcccagagaaccggaagacatatccacgcccggaatgtgcttcatatccggatgtccctgtaaatacgatccggtatggcgcagggtcaaaagatcctccaccggaaaataaccgcggtttgccagtgccgagtaaagtcccggcgccgtgtgtcccttggacagcacaaaacggtcgcggtcctccttcttcggatccttcggatcaatattcatctcttcaaaatataaataggtgaagatatctgctgctgagagtgatccgcccggatgtcccgccttcgcgctgtgcacggacgatacaattcccttgcggacttcaacagccatcttctgaagtgccagcttatccatagttcccccttcatgcattctttgtcattgctactgcaaaactttgtcatcaaataccgcagagcatcttcggtaattagtcaccaaatacagctctgtagtccgcctggaatttctcaattcccgcatcggtaagcggatgcttggtcatctgctcaataactttgtacggaaccgttgcgatatgtgcgcctgctaatgcacagtctgtcacatggatcgggttgcggatcgatgcagcgataatctcggtctcaagtccgtagttgtcgaagatctgcacgatgtcctggatcagatcgatacctgccgtgctgatgtcgtcgagtctgccaaggaacggagatacataggttgcgcctgcgcgcgctgcaagaagcgcctggtttgctgtgaaaataagcgtcacattcgtcttgattccctctgcggacagcactttgactgcctttaatccctctacggtcatcgggatcttgactaccatgttcggatggatcgctgcgatctcacgtccttctttgatcatgccttccgcatccacagtggttgcttttacctcgccgctgatcgggccgtcaacgatcgtcgtaatctccttgatgacctcgttgaaatctctgccctctttggcaatcagagacgggtttgtggtaacgccgcagatcactcccatatcatttgccttgcggatgtcctctacgtttgctgtgtcaataaaaaacttcatattcctctccctttctgcgcttgtgcgcgcaccctatatgtgtatccgggtctgccccggtaccattctcatttaccgggggatgccgttttgacatccccgtatgcttcttattgttttttagcggtaaaacagattgccaagcatcagatccttcttgaactcgcggatctttgtatccttgtcaatataaaccgcctcgatgcccacggcatttgcccagtcgcccatctgctctgcggtgaggtcgtaggtaaatgcggtgtggtgtgcgccgcctgccaaaatccatgcctccgcaccggtgtagagatccggctgcggtgtccagtaattcgttgctaccggaagcttcggcatcggcttctctgtcttcttacagtccacatcgttgataatgagacggaaacggttgccgagatcgatcaaggatgtcgcgataccgcttccttccttggaggtaaataccagtctcgcagggtcttctctgtcacccatggaaagcggctggcacttgatggaaatcgggccgtctgcgatggacgggcagatctcaagcatatgtgcctcgagaattccctctttgccttttacgaaattgtaggtgtaatcctccagcatggaagtaccctttgcatccttcttgcctgctgtcataatcttcatcaggcgcaccatcgctgccactttccagtcaccctctgcgccaaagccgtagcctttttcctcgagacgctggattgcaagtcccgggagctgctttaaggcaccgagatcaccgaagtgtgttacgattgcctgataatttttctcgtccagaaaacgctcgaagccgatctcgatctgtgcctgtacggctacatggcgtctgaactcctgcggatcacgtccctctaataaaatgtcatatttgtcataatactcgtctaccaaagcgttggtatcggactcggatacggctgcaactgcctccgcaatctcgttgaccggataggtatccacttcccagccgaacttcagctgtgcttcgaccttatcaccctcggtaacggctacgtttctcatgttgtctgccacacgcatcacgcggatatggctgctctcgatcacgccgactgcggtgcgcatccaggatgcaatgcgctcctgcacattgacatcgctccagtgtccgactacgaccttgcgctcgattcccatgcgtgtcacgatatgaccgtactcacggtctccgtgtgctgactggttctcgttcatgaaatccatgtcgatggtgtcataagggatctcctcattgaactgggtatgtaaatgaagcagcggctttctgtactcctgtaatccgagaatccaggactttgccggggaaaatgtgtgcatccatgtgatgacgcctgcgcactcctcatccacatttgcctcgttgaaggtcttgcggatcagctcgttggtgatcagggtcggcttccataccacttcataaggaagcacaccggactcgtttaactttgccacgatgattttggaatgctctgccacatgtgcaaggcactcatctccgtaaagatcctgtgatccggtgcagaaccagaacttgtaattttttgttgctaacataatgttccctccatgaaatatatttattttcagcagtaactgctgtgtgaatcccattctgtaaggtgtggcagaatctgccgccttcgtgcctgtcttataacggcatcgtccgggctgcctctttctctgttgcaagcgccgctttgtacgccttgatgtaagcgtcaaatcccgcaacatccgccggatccggctccatcacgcttccggactccccgccgaagactttttcggagaggtactgctccaggctctcgccgtccgctttctgcagcatgtaggatgccagcagcgccatgccccacgggccgccctcgccggctgtctccatcactgccaccggcgcatccatcgctgcggccaaaattccctgtccgacgcccttggtcttaaagagtccgccgtgtccgtagatgcggtccacttttactttttcttccttcagcagaatatccagaccgatctttaaggttgcaagcgctgcatacagatgtgtccgcatgaaattggcgagattaaaatgtgcatccggcttgcgcacgaacagtggccgtccctcgttcgctccggtcaccggctctcccgagaaatagttgtatgccagaagtccgccgcagtccttgtcaccctccagcgccttattgtaaagctttccgaaaagctcgttcatatcgacattgattccgaagttctccgcaaactcccggaacagaccgacccaggcgttcagatccgaggtacagttgttgcagtgcaccatcgccacggtatcgccggacggtgtggtcaccatatccagttcctcgtgtaccgcctttaagtcttcctctaaaaccaccattgcgaacacggacgttccggcagacacatttccggtgcgcacagccaccgaattcgttgccgccataccggtaccggcatcaccctccggcgggcagagcgggataccggcttccagcctgccgctcggatccagaagctttgcgccctccttcgtcagggtcccggcattctccccggccacgagcaccttcggcaggatctcctctaacttccatgtatatttccctaccgcaggaagcgcatcaaactgcgccagcatcttccggttgtaatctcttgtcttcgcatcgatcgggaacataccggatgcctcgccgactcccagtaccttctcccctgtgagtttccagtgaatgtatcccgcaagtgtggtaaaatatgcgattttatccacatgctcttccccgtttaagatcgcctgatacagatgtgcgatgctccagcgctgcggaatattgaacgagaactccttcgtcagtgctgcggcagcctcgcccgtgatggtatttctccaggtgcggaacggaaccagaagctcccccttctcatcgaacggcatatagccgtgcatcattccggaaaatccgatggcaccaagctttgtgacggcaacgccgtatttgttctgtacatcctctgtcatcttgcggtagcagtccctaagaccgtcccagatcatatccaggctgtacgtccagattccgtcgaccagctgattctcccagtcgtgcgcaccggatgcgatcggctgatgtgtctcgtccaccagcactgccttgattctggtcgagccgaactcgataccgagcaccgccttcccactctcaatcctctcctttgcatttcccatgtgtaacaaacccctttccgaaaccatgccgcatctctcatgcacccatgatttccctgcactcatcttgttgatgttatcttaagcataaaacttgtatgctcgtaataacaagttgttttttatttatttttacattgtgtggttctctattttttatctatccggaaaacatgcacaccgtgcgccggaatttcagaagaaaggctgtcattctgcacaataagctctgttccatcccagagttcccgcgcccggatggttcccgtctgtccgcacatgtctgcaaacgcttccgtctccggcagcgcaacctcacaccgcgccggctgctccataaagttaaacagggcaagataccgttcgtcctttttttcattgacacagctccagaccgcatgcttttgatcgcgcgccacctgtctgcccacatagtctgcgtcgagcatctgcagcagctcccgtctcgttaaaaggaactgcgtccagtcatccagcttcgtcagttcaccgccgatcatcaaaggcgagccgaacatacaccagagcgtcatcatcgtcttctgctcatccctcgtaaagtttgtctgccgctcctgcccgaacccttttccgagccggccgaccggcagcatatcgcagtccggaaacgatccgcagcccacatggttctgccacagttcacagcgccggaacatgtcgtagagcagctcccacgtatcccagaaatcatccgtgatgcgccacatgttggcataggtttcataatgccatgccttttcgatcagcgccggtcccggcgacagggagagcacgatgtcccggccgcacttttcaatcgcatgctgcagcatttcgatctcatgcgccgccgaatacggatgttccacgtacagattggtattgcagatatcatcgcatttgataaaatccacaccccactgtgcgtacagcgccacgatggaatcgtaatattcctgtgcgcccggctctcccatacgaatgccgtacatgtccggattccacttacagatcgacgacggatccgctatatcgctcgccagtgcatcgcttcccaaaatcggcagatgccggtgtgccgcttcccgcggaattccccgcatgatatggattccaaactttaaccccagcccatgcacataatccgccagcgcccgaaagcccacaccgtccttcgccgacgggaagcggtccgtacaggggagcagccgcccgtactcatccatcgagacctccccaaacggaatatactggtacttctccctctgacttccggtgttctttgcataccactggatgtccaccacaatatattcccagccgtacggttttaagtgcgccgccatataatccgcgtttgccctgacctcccgctccgtcactgtggtgtcataatagtcatagctgttccaccccatcggggcatgtttcatccggtatttcatgcgtctctccttctcttccccctaatcaaaatgtgcacagagtacacaaaaagccgctgcagatgcagcggctttttgttgtcatacatcctgcttccaagtgtatgacttgtactttcgtacttacaagttgtttttattcgtcctgtgtcatgtccgtatcgtctcttcttctgcaggattcccggatcaccagttccggctccatcaggacgcattttccttcgatattggaatttccctcccggataatccgaagcagcagttcggcggctgccgctcccagttcctcctgcggatgggagatcgtcgtcagcggcacgcggcatgtctgcgccagataggaattgtcataccccgtcaccgagacatcctggggcacggaaagcccctcctcattcagcgcgcggatcacctcgatggcaacctgatcgttgtacgccaccaccgcctcaaacggatgattgccgcgatctttcgccatctgcctgatccgctcaaacggatgggtcttgcggtcctccgtgtagaaccagatcaccttatccggatcatacgcaattcccgcttcctgcagtgcctgcacataccccttgtggcgctgctgtccctgcgtgtcgtcggatttgaagacgcccacaatgcgccggtgtcccagttcaatcaggtatctggtcgcaagataggctcccctgcagtcgtccagaagaatctgcggccggtccagaagctgggcatgtactccctgtataaatacataggggatatgatagctgtcgagcatctcatacagattcacatgccggcagaaaatctggctcttgctcggctcgatgatgagcccgtcgatatccttctgcagaagctcctcgagacactttgcctcaaggcttcttgagttgcgcgtatttttcagcagaatactgtaaccgttctccgtcagcacctggtcaattccctgcacgatgcgcggaaaaatataatccgaaagataagttgtcacgaccgcgatatttttggacggcgtcgtgtgccgtaacatctccgagcagaaggttccgcggccatgttccgcatatatgtatccttcattctgcaaaatctgcagtgccttgcgcaccgtctgccggctgaccccgtattccgccgacagttcattctccgaaggaagcttctctcccgggcgtatctcccccgacatgatcttgccatggagctgctccatcagatcataatattttaatctcttatccattccgtccgatccccctgaatgccttctctctttgcgcgccgtcagcccgttatcccgacagcctccttcgccaggcggtctgcctcctcattgcccatgacgcccgagtgtccctttaccttcacaaaagaaagccggatcttatcctccaccgagcgcacatactcgtagtaggccaccgtaccctttttattgcgcttccagagtccttttgcccacatctcgattcccatataatcgtaatagatcgtaagatcctttaagccaagttcgagcgccttttcgatggctgccatgctccctaaaacctcgcctgccacattgcgcatcgacgccatctccggctccttccccgcaccctgcagcacttcttttccgccggcatgaatcaaaaaacctccataaccgtacacgccggtaccggcgtgaaaagagccatccacgaacgcgtaattctccggcagatcctctgtctctccggcagattccgcacctctcgtctctgccttgccgtctccggctgttcctgatttctgctgtgctgctccttgcgttgccttctgctgcgccgctccttttgcatgagcttctcccccacgcgccggtgcgctttccagaaacgtctccgcttcttccagcgtcttaaaactcttgtaaaccgctccggggaacccgtgcaccatcgccttacactcgtcccattttgtgtatattcccggtttcttaccaaccgctaccgcataatattttactgccatctcgtcatcctttatttcgatattttataatacaatataccatataattcccgcacataaaaggtcggaaggtagagaaaaaatgtccggctcggtgtgctgtagcttgtaatgccaagtctctttgccgtctgattcgcccggtactcatggaattcactggttataatcgtgacgggcccgtcgattccgtgctgttgtaacaattccatggaatattgcagattttccgccgtcgtcgtggaccggtcctccagaagcagtctcgccccgtcgatcccccgcccggtcaggtaacggtacatgcactctgcctcgctgatctcctctccatctccctgtccgccggataatacgcacacagcttttggattccggttcagatactcatacgccgcgcaaagccgttcgctcaacacccggctcggccgctcccccttgacgctgcatcctaagaccaccgccgtcgtattctccggcgcacggttcgccgcgcttcttatcatccccgccgtctccactgtcacgataagcagaataaaaaggagcaccatgcccagggcggacaatcccactctgccaccgcgcgtctgccaaagtctccctgccacatcctgtacctgccggtaaaaaataccgtacagcagcacaagggctgacaccgccattcccgtaatgttaccgatattaaccacgacaaatgccggaatgaaaaaccacaggaaaaatacggctccaactgccattatccaccaatgcatccgtgacattctttctcctttctaaaaaagcaatgagcggcacgccgaagcgggccgctcttgtcctctcttgttacaaatcttgttacgaaatctccagcttgcagttcgcacgcatttttaacggacattcataaacgttctcattattctcttttgcaatgtaagaaagcggacactttctgcagtcgcctttattaaaatctccgccaacctcaaattttaaggttgccgtcttcacacccttcaccatctcttcctgccggatgtgatcccagctcaatacctgactgcagccggcacacttgctctcgttcaatgtcaccacgcgcttgcaggtcggacaggcataaaacttcttaccggacggctccaccagttccacaacttccgccggaaactgcttaatcaattcctctctcaaattgtcctgcatgatccaatcgctcctttatcctgagtttgcactagtactatcataccacaaaggcggcggtactgtaaaccgctttccttcgttttccgctcagattccgtttcattattctccgggttccgctacttttccccctgttgctaccggatcatgtccatgatgtaatcgatcgtttcctgccactgctccctgtccgtaatcccggcctcgccgtctcccttctgcggtccgtaattgccgaacccggcatggttgccgccctctaagatatactcgcggcagtccgccgcaaggccgattgcttcctgatatttttccatattcaaaacgccgtcctcactcccgtagagtgagagcaccggaagcgtctgaagttccctggtcgggtacgccgccagaaaaatcagtcccgcgagctctgactcatgctttgccgcatagctgcccgccatggctccgcccagagaatgtcccgccagataccagtgctttacctctccaaactcctgccgcacctcatccgccgcattcggctttaaaatggcaaggtgcgccggcatctttaccgtcacgcaaaagattccctgctgcgcaagcccgtccataaccggtgcgtacgccgtctcttccaccttggctcccggataaaagatcagtcccgtctcactctgcggatctccgtaagcgatgtaggcatccgtctccgatacctctgttgtctgaagttcatagtccttcgcatgataataatctgccgtataggtattaaatcccacaatcacggctgccacgattaaaaccgtaaaaataattctgcgcaccgcttttgcatgcttcattgtctctcatcctccgacaccggaatctgcttccgttactttcggatatctgcaaccacctcatccggaatgacgaactgtacgcatcccatatacatcggtgccacatcaccctcgttaaagcatatcacaagatggccgtccgaatccagataaaatgaagtctcatctgtaattttgtcaaaattccattccggaacctcggcattatccacccagtacatcttaccgtcatcctccgccatctgctgctgcatctgctccttgatattctcgctgatcggggtgatataatccgcgccactctggaataaatccgaaagtgtcagacgctcccccgtctttaagtcaatcgtataataatagtcccactccgcgccgctgcctgccgcctgatagcacatcagctttaacgtaaagtaatcgtcggtcgtgctgataacttcgtgcttgaccacgacctcctgatagccctcttcttccttcctgctctcctcgaactccgatacgatctgatccgtgatcttttcaatctccgcattgatctctgccgttgtcttttttaagttctcctgcacctggacctcagtgtccgtcatctgttccgtatcgctctcctttaccgtcagctccggcgtcttaatgtccgccgcatgacctccgttgtcgtactgataattccggaacgtcacagcctccacgagttttccgaccaccggtagattccccatggcatacgccacgctccccgaggtgttcggcagcaccacgaagactgccgccactgcagcagccgctgccacaatatttctcacggtatgcatttttctgctctcgtttcgtttttccatctttgcttcctcgatccgttttttcatctgctccacctgctcgccggacatttccgatccggcatactgtcgctttaattcctcgatctttttacaatcctgtttcttattttccatatgcggcaccatcctttcctctattcccactgccatgtatccgtaagttccagccgtagcttctttaatccacggtacagccggctctttaccgtattctggttctcccccagcacgcgcgcaatatcctccagcttcatgtcctcaaaatagcgcagttcaatgaccgctttatcccgttcttccatggcgtccaatgcccttcttagatcaatgttctcatagcggtcttctcttccctcttccgccggcatctcatccagggaaacttcccggttcttttttacatatccgaagatctcgtttaacataatgcggtaaatccatgtctgcgcatattcctcctgctttagcgcatcgctgtttttgatcgccttgtacgctccgttctgtacgatatccgcggcatccgcctcatgatgtacgtaactgtaggcaagacgatagtatttgttgtaattttccagcaaaagctgttctatcttttgttccttatggtttttcccggagaaaaacatacgatctcacacctccttttaactattagaccgtccggacaccaaaaaagtttcgctgccgtataaaaaattatattttctccgatccggttccgttttttccactctcctgtctgcacagttccgtcaaaaaccggtacattccctcctggtaaatcgggcgctccaccacacaatccactcctgcggcaagcatctgacactccaccagttccttctcattggtcgaacagcagatcgtaaggcttcccttcggaaaattttcccgcaccgaccggataaacggctcaccgccctgcatataccagttcacaaaacacagatcataggcggtgcccttagacgcggctctccttaaatacgccacggcgtccgccccgttttgcaccacgtcaaccggaagcccgagacgcgcaagaaccgctgcatgataatctctcgacagttcattgtcgtccagaagaagcgtctttaaccccgcaaaacttttgggctgtccgatcgcttttccgattctgaaaggcaggaacaccctgcagagaatctgcgcatcctcccgtacttccacacacatcgttccgtgcaaaagttctacgaggctcttgatcagcggatagtcttctcctccgtcaatgctgccctgcacggcaagttccagttcaagctcatcctcccccgttcttacttcccgatagcctgtaaaaatccggcatcccggccgcgcgttgatatacgctttctttagcagtcttgcccagatctgcttgagcctcctgacatcgcccaccagatattcgcagaaaatctcaccctcctgcaccgtcacctcaatccccatttccgtacagattgtcctgcactctgaggtcagttccgcaaccacatccgaaatctgaaaggtgtcgcagacactctcgcccacacctacaatctgcccgtccaaaacactgtccgtcagttcccggatgtgctccagatgcctgtacatatcctccagtcccacagacttattttccgttctctgacctgtcatttctctgtaacactcctcgattaccgcgacgtccgtgcgcaccgtccgcgccacctgaaacagcagatgttctctgaccgtgcttaaatgccgctggctctcaagccgctccgccagtgtctcatagcgtgtcatgatattggacacccgcttttttaccacctccggctcgcagggagaaaatataaaatcgtccgcccccatctctaacatttcaagttctctctcctcgccgatgaccgtcttcacgatgaccggaatatcgagaagcttcggatctgccttcatctgctttaatacctgcttcccgctctttacgggcatacacatatccagtatgacaatatccactttccgctcttctaaaatttttagtgtctcatttccgtccccggcttccagcacctcatattcctcttcaaacattgcgcgaaacgacgctctgtttacgtcgatatcatccgctaccagcatcactctgttcttttgcattgattcggctccattcttttatcgtatcggtaacatatcttttaaaatataacataccatcttttatttctcagcaaaatccgtaccgttttttaacatccagcgcccctgtccttccccttctacaaaattcgacacaaaaaggggctggtgcttgaagcaccaacccctttttcttctcaacggtaaatcatactgtcgaggacggcatacatctgtgtaatctcaatcggcttgcttaagtgtgcatccatcccggcatcgagagactttcgcacgtcctcctcaaacacattggctgtcatcgccacgatcggaaccgttttgccatcctcacgtccggattcccggatctttctggtcgccgtcagtccgtccatgaccggcatccggatatccatcaggatgacgtcgtaatatccgggctcatgggaaaggaaatgcgtcacgccctcctctccgttgaccgccacatccacctgcagattcttgtgcagcaggatattgcgcgtgatctcaatgttgacctcattgtcctcgaccagcagcgctcttttgccggtaaaatcgtagtcgggcgcctgtatatcgccctgtccccgcagcttttctccggaatttctgacacgctttaagttcacattcacaatgaacgtcgagcccttgcccttttcgctgtatgcgtcaatgtgcccgcccataaattcaataatgttgcgcgcaatgggaaggccaagaccggtaccgccgtttagcgtcgtgattccctcatcctcctgctcaaacggctcaaacatatgcggaataaacgcttcggccattccgactcccgtatcccggatctcaaaccggaagccggcatcctccccgtcatcgccggtatgctccacaataaagtcaacccttccgtccggcatcgtgtattttacggcattctccagaatattggaaagcgcccgctccagcttctccgcgtcaaagcaataggtagcatcaaagcttccgcgtctgtccaccgcaaagtgaacgcgacgctccgccgcctgccgcatcgcctcttccaccgtctcctccaaaaaggcatctaagaccaccttctggctgttcaatgcgacgttgccgctctcgatctgggaaagatttaaaatatcatccacaaaggacagcataaaacgggcagactggctgatcttgtccagattctcgagcacctgcttctcattgttcacatattccctggtcagatacgtaaggcctatgatggaattcatcggcgtccggatctcgtgactcatgcgctccaaaaactcgttcttctcctgattggcatgtcttgcgtcaaacagcgccgacatcagtctctcctgctgccgctgttcttcctcatagctctccgtcacgtcccggcgcaccaaaaccaccgtgtcacggtcatcctgctgataagaaatatgcagttcttttctgcggtatacctccccgcacagcaggcggtacgaaacaaccagatcatccctctgttccagttccgagagaatatgcggcagttctaacgcagccgcgcatgcctcccggtccttgggatgaacatacagcggtatcatctgcgcatttacctgtgtataatctccctccggcggcggagtcacatccgtatcgtcattggtcacgatcacatgaaatgttccggtatgtacatccacataggtaataaaatcgagttccgacttgatgacctgctccagtattccgcgctctttgatggatttcgcgtctcccattctgcatactcctttatttcaaaaaaacaaactatgctttattataacaggatttgaaaaactttccactgcaatttttcatttttccccctgaaagtgcagttctacctacggttcgggcatgtgtccctcctgctgcaatgtgcgcagattctgccgccatgtgccgtctccccgcacgcctccgccggcgcaagctccatctcaaacaccacgcttttcttcggtttcaggcaataccctgccgtacagacgaccttgtgctgttttgcccgcgctaagatctccggcatcgcagacagcggatgtgcttcgtcatcaccgaaaaaatgatacgccgccacctgatacccggtattctcccgtatccatgcctccagcatgccatagcctaacatcagaagttctccgccgatactctcaagcatatagctttccagcatgcgtccggtgttctggtagcgttcctgcagcaggtccacatcgcttccaagcgtcacaaccgcagtcgcccggcgtaccgtatccgtcccatcctcaaacatcagatacgccgcttccttccatttcaggcagcccgccagatcggatgccacacccttcaaaagcgccttatctttttcctcaaaatgataccggctcctgacctgttctaaaaacgcacttgtcagacaggtccagagccggctctctatgtatcttcgttccacactgcactccctttcctgcttttattgtactgcattacagggagattgcaattcctttcttctttcctttacaaattcaatttcataatgcgatccgtatattcgcggatcactctggtggattctttaaagcgcgcgagttcacccggtgtcatatgaatttcaagcacgtcatatgccccgctgcggtttaacacggttggcacccccgcatagacattccgctccccgtactctccttccagcaatgttgataccggaatgatcctgttctcatcatttaaaatcgccttgatcactcccacgcatgccgttgcgattccataataagtcgttcccttgcggttaaaaatctcccacccttcctgtgtggtgcggtagaccagttcatccagatccacatcccccaccagctctttattgtccgcaatcacgtcataaaacggttttcctgcgatcgtaaccgtagaccacggcaccatctgggaatctccatgttcccccatggaatacgcgtgaacacttcgcggatccacattgactgtctgtgcaatcatattctgcaaacgggctgagtctattgcggttccggtaccgatcacctgatttttcggcaaaccggacagcttatagatataatgtgcaataatgtccaccggattggagatcgcaataaaaattccgtcaaatccacttttcataatcggttcaacaatggattttgcgatttttgccgacatctccagcgtatccagtctcgtctgtccctgctttggcggcgctccggcagtgatcacaatgatatccatatctccgcactctgcataggttcccgttttcactttcacattgcggttcagatattcaatgctgtcccgcatgtccagcatctctccatacgcgcgttcctcgttgatatctatcagcatcacctcgtcacatactccctgggttaccagggaaaatgccgtagtgctgcccaccagtccacagccgacaattgctacttttcttgttgttattttcatacattcacctgtcctttcaacggattttcatcctatgacgcaaaaaaggtaccgtcctatgacagcacccttgcaaatcctttttcaattatagaaagcgttttctctcttgtcaagtcctctctttttctccacaaagacaattctatcagggaagccgttttcgcagtcctttcgggtaatgattcttcatgattccgcccgcgagctttccccagccggtactgtatccgtccaccgtgattaaataccagcccttttctccctgcgccgggaacgtctccccgtttaggtatccgcggatctcccgcccgtccgaaggaagatccatcgtatgtaaaacatccgccgcatgaagtgtgagcgcaagtgcgtgtgaaggttcaaatctgcctttcttcgccgttcccagatgcagtcccgggcgcagcaccttaagaccttttaccgacggcatgccctccgggatccggtagagctgctcgccaaatttcagatagcggcactcccgccctgcatacttctccaatgcgtccccggcgaaagtctccccggcaaatgccagatattccgggatgcccgccgcagcgctcttagaatctcctgccgtaattccgttctcatacccgttctttaacagacccgatccgccgtccgcaagcgttccctccttgcgcagcaccgccacataatgtccttccccgcgaagcttatgcggccacagacggatcgtcgtggaaagttctcccagtccgtgcgacattccctccgcaagcggcacctcctccacgtagaattccggatgtctctccaggaatcgcccgatgcttccctcatcctccgccggtgcgaacgtgcaggtcgaatagaccagtctcccgccgcccgcaagcatggatgccgcgcagtctaagatctcatcctgtctgtgggcacacagttctacattctgcgtgctccactgctcacacgcctcctcgttcttccggaacatcccctcgccggaacacggtgcatccaccatgattctggtaaaatactcgctgaaatgttctgcaaggcgctgcggcgtctcattcgtcaccaccgcattggcaatccccatgcgctcgatattctccgagagaatctttgcccgcgccggatggatctcattgctgatgaggattcccctgcctgccatcaccgccgcaatctgcgtgctttttcctcccggtgccgcgcacaaatcaagaatccgctcgcccgcaccgtctgccatctgccgcgtcagatacgctgccggagccatggcgctcggctcctggatataatatacgccagcttcgtgatacggatgttttccaggcgtatcctttgccgtgtaatagtagccatgctctgcccatggtacacgctccagcgagaagaccccgcggtttaaaaatgacacgtcgtcccccttctgcggattcaggcgcagcgcctggtagcgcgcgatgtcgtagctttttaaaaatgcaggatactcctcccccagcatgttctccatccgttctaaaaattcctgtggcagcatctttctctcctttgtctctgcatgattctctgccgcctattgtagcacgaaccgtcccccccggcaacgcattttaaatgcatgcccctgaacaatacttgctgcatttaaaaatggcgtgtgagaagatcacttttttccagaaaatcctccacggtggaaaatcccagcttttccagcaattcaatcacgtaggggttctccagaggtgtctgatacaatgcctcttttccgtaatgatccacgtaggcactgccctcttcgcgcggcagtagcgcccgcggtcctccgacacagcctccgacgcatcccattccctcaaaaaaattagcctccgtattccccgcctggattgcctcaatcatctgcttacacgcctttccgccatccgcctgcatggggcggactgcaattttccgtcccgggtggagttgttctaccgtccgcacgaccgcctcgctgacgcctccggtccgcgcatagattctgcctgctcccgaagaatgttcgcttgcatcctcctccatctgctgcggcgcaatccccattgcctcaaacagcatcgccgtctcctgaaaggtcagcaccacatcaatcgcatcgcagatatccggctccttcgcctcctttttcttggcaaggcacggaccgataaacacggtgacggcatccggatgcatctttttcaccgccctgcccgcagcgatcatcggagacaccgcccccggcatatgcggtaccagttccccgtaaatattgcggatcatggacacccagaccggacagcagcagctcgtaagcaaaaaatccgtatcccgattcacatggcggtcaaattcaagcgcttccttcaaggttaaaatgtcggcaaataccgccacctccaccatcccggaaaatcccgcgcgtttcaatgccgcacggattgctcccggggagaccccctctccaaactgtcccataaatgccggcgcaatcagcgcatatacctgtttttcccgtgtaagcagcacttcacgcaccgcatttaaatccgcgaacttttccggaaagaccgtctcacaaaccggaattgtgcgctccgtcttttcttctcccgccaaaagcagacagtccatctgatcatatcgcatttcttctttcctctgtttctccgctttgtactctctttttaatatttcctcatgcaatctgcgtatgctctccatctttcacacctgccttttctttcaaggatgcccacacatcctcctttttattcttcgcacactttttccgttgtagtttgatgcacaaaagaaaaagccatccgttcctgccggatgacttcctcttttgccccgggagccaaaactcccattttttctaatcatacagaccgatgtgatacttaagcttgcggtatactttccatccaaagattaccggcatagccagcaccagatatgcagtcgataacattccggctgctccaccaacgatcatcagaatccatattaaaatattcatagtttttatcctctcataaaataataattgctattttatggaggatacaaggccgttcttttttccgtcggccctccttatgtatgctacaatccttcttcccgagggaatcagttcccactgctgcccgcgctctctccccgccaaaagaaacagcgcgcccaaaagtcccgccagaccacattccagaagccacaccaggagccgaagctgctggacattccggtagcggtaggcactcttctgcctcagcgtctctatgacatgcgcctcactcagttccctgcctgcggcctccacttccgggcgctcctcgttcggtgccgcgaccatggcgccggtctgcttacggtccggacaaaattcctgtccgccggtctgccccatccgcttcacactgtccaaaggtccggactcccgcactccgtttggcagtgccgccgccacaagcatcgcggctatgagcaaaaggcagagacggcatttaaagaattcccctgatcggattgatttcctttgcctttgcaaaaatctcatcatttttactctccagatactgctccagtccgcggacttcttcgtccgtaaagccctcattcttcgtcacgcggcatgccggcaatatggcttccgcaacatcccttccccgctcaaaacgcacagacacacagcgtctgccgtcttttgcaaagatacccgaatgtgtcagtctgacttcttcttcccttctcattccaatctccattccggaacaaaattactgctgttcctccaaagatccgtcaagcacctggcttggcatctgatcccgcagatagacctttccatggtcttttctgctgtcgtactctgcctgcagctgccggttcttctcctttacttcctgctcaaactctctcgccgagagcaggatgcatccggctccgcggataataatctgctccagcccgtcggaagtggcaaccgtcacgcggtatctcgacgcgtgttcatgggcgaaacgctcaatatacgcgtccgccgtctccgcctccttcgtgtacaccacatgaatattgtgataatcacacgcttccgtctgatgtccctcgacgcggtacgcatcgaagaccacaatcagctcacatctgcggattccctgatagttgcagagagtatccaaaagccgcccgcgcgcgctatccatattcactctggcaagttccgcaagttcctgccacgcaaaaatcacattataaccgtccaccagcagatattccacgccggcatccttctgcttcccgcctccggaagcagaaacgggactgctttctatgatgcgcttctttttatagccgttcgttgcgccggcatctttgtctttcttattagcattgtatgtccggtcaaggattctgtcaatctcttccgtgccgatccaggcttcttcctcccccgtctttgcgtggaaattcgccgcatccggcagccactgtccgggataccattcctccccgctcttatcctgccctggcaccggcggcaggtgcatataggaaaacacctgatcccacggcacaatgaatcctgctccgtgcgcacagaatacagaatccgccgtattctccagatcactctgggcatcatacccgatctgcgccaccacttcctccgtgttgtgacaggggaaatatccctttaaggcaaccgaaagcttcccctctcccgcggtgtatgccgtcacctcacgctggtaattctgcatggcggacacgggcgcacttcccacaatacagccgtctgcactgtaggcaatcgttcccttcatgcggtcgatatcattcatggcgcgtccgaccactcctgccggaagcgagagtctgaaatcataccacggctccagcagcaccgtttccgcctgcatcagtccctgacgcagcgcacgataggttgcctgcctgaaatcaccgccctccgtgtgctttgtgtgcgcgcgtccggcaacgagtgtgatcttcatatccgcaagcgccgatcctgtcagcacaccgacgtgttccttctctcttagatgggtgagcaccagtcgctgccagttgcggtcgagcacatcttcgctgcagtccgtctcaaatacgagcccgcttcccggctctcccggttcaagcaaaagatgcacctcggcgtaatggcggagcggttcaaaatgtcccacgccctccaccgtacctgcaatggtctccttgtatacaatccttccggcgccaaatgtgacctgcacaccgtagcgctgacggatcagctcgctcaaaacctcgatctgaacttcccccatcacctgcacctggatctctcttaaggtctcatcccacacaatgtgaagctgcggttcctcctcctgaagttcccgcagtctgggaagcatgactgccgggcttacctcttccggcagtatgatctgataagtcagtaccggctctaacaccggcagcctggacgctttctctgcgccaagtccctcccccggaaatgtgcgaagcagccccgtgaccgcacagacgcctccggcgccaacttcctctgccgtctcatatttttcgccggaataaatgcggatctgggtgatcttctcttccccgatgacctgtctaacttttaagcttccaccggtcacttttaagtaggtcaggcgttttccctgcgcatcccgtgcaatcttaaatacccgtgcaccgaatgtctccccgtaggcagggatactggcataccggataaagtccgccagaaacgccttcaccccctgcatcttgagcgcagagccgaaatagcacggaaacagcttccgttcccggatcagtcttttgatctgctccgttccgaccgcttcccctgccagatactgctctaagacctgctcatcgcacaccgccacattttccgcaaaagccgcgctctcctgatccgaaaaatccacgcagttctcatgcagctcctttttcaattccaagagcagcgcctcctgatccgttcccggctggtccatcttgttcacgaacaaaaacaccggcacctcatacttcgccagaagcccaaacagcgtcctcgtatgcgcctgcacaccgtccgccccgctgatgacaagaatcgcgtaatccaatacctgaagcgtccgctccatctccgccgaaaaatccacatgccccggcgtatctaaaagcgtgaccgtctcctccggcagctttaataccgcctgcttggaaaaaatggtgattcctctctccttctcaagcgcaaaggtatccagaaacgcatccttgttgtccacgcggcccgccctgcggatcattccgctctcatagagcagtgcctccgataaagttgtcttcccggcatctacatgtgccagaactgctgctgcaatattcgctttgtcactcacgttctccggttccttttcctacaaactgattcttctgtaacggttgatgcatgcaaaaatctcctgtgccctcggcattgccagcccgcacggcacatagctgctctccgtcaccgcggcaagtccgtgctcctccacatactgcatcaatagggaaacgctctcccttaaggtgcgttttccgttgaacacatggagttcggcatactttaaaaagtaggcgagcgccgcgagctgttccgtatccgccagctgctccacatagcgcacatcgatcgtatcgcggttgatggagatgccgtcgcgtcccattgtctttaacttcatgcgggcatcttccttgaatgcgcgatccggccgcaccgcacgctcaaacgtcggagccgcctgtttcggcggcttcacctccggcagcgggaatctgtccgcttcctccttcgcaaaagcggtgatctcctgcggtttgtagcggttcatctggacaatgcagtccgccacatgaaaataggagccggaacttcccgccactagaatcgtggagataccgtactgctcatacagctccctgatacggtcgataaacggcgtgatcggctcatcctcgcggtttaccaccctctgcatcagctcgtcgcggatcataaaattggttgcactcgtatcctcatcgatgaggaacgtctctgctcccgcctccatggcctccaccacattggcagcctgggaggtgcttccactcgcatcctctgtgcgaaaggcactcgtatcctttccgttcggaagatcgttgatgaacatggaaatatccacctttttgatgcttcttccgtcctccgcgcggatcttcaccgccgtatcatcggtaatgacatactccctgccgtccccggcgatatggttgtacacgccaagctccagcgccttaagcagtgtggatttgccgtggtatccgccgccgacgatgagtgtgattcctttctttattcccatgccctgtatctttcccgcatgcggcagcacaaagcttaccttcatggattccggcgctgtaaacttcacggcgtccttcatcggtctgccggacacgccggattcacgcggcaggatggatgcatccgccacgaacgccaccagcccctgctcctttaaatgatccctgatatactgctgatcctccgcgagatccgccgcacggtacaccgccttttcatccagtgccttataaaacaggctgtgtaatacacattccggaagaaacgtaaaaaagattttctccagttctcttgcattgacggttctcccgttggcagggaatcccacctcaaagcgaagcaccagatcgccctttgcctcatccatctggcatgcggtgcgctccaacacttcctgtcccgggcggctcaccgccagaagtccgctctttccggagccttttgccttgaaagacacgcgctcaagttcccgcccgaactgacgcagcagatagtcgcacactgccagcctgcggcatttcatccggtagagatccgccgggaacttcgctgcccctcccctgacatggacgctcaccttcgacggcgcggcaaacggatctccctgcacatggtcgatcgacaacacataattgccgaaatcgtagcttcctctcgtatccttgtaagccggataactcttatgatcaattctctgtaacagatttctaagttcattctgtgactgcatctttttattccttcttatatttcttttatattctttctgcgaaatcgtcagttgtcccgacgcagctccgacaacagctccgctcgtctcgttccgattaaaagctgtttgttgtatgtctgatagcgctcgcaggtatgctcggagagaaaccttgcggactccgacgtaatcgtgagctccgtgacaaacaccaccatctcctcaccgttctcaaacgcctgctccataaagtcaaacgcgtgctccaacgccgcgcccgccgcttcctcggtctgcaccagtacctcccgctgccggtcaaatcccacttttgccgcttcaaaacagctctgtgccgaatcttttgtcacttcctgctgcgccgcttttaatttttccatcaaaagcttctcccgctttgcctcctcgcgggtgtaagcgtcatttgcaatctgccgcagcatctcctgctcccgctctgcgacaagcgtccggtaacattccgccggatctgcagctgtctccacctggctgcggtactcttttaaaaaggcataccacgcatccgtcaatgcccgctctgacgctgccctgccgaaaaacgccgccagaccgtccagcagcaggtgtaccaccgagagccgctcatcaaacgccgccgcatagatgcgcgcgtagatctccggtctgacgcagccgtccagaatctgcggaatgccgtagtcatcctgatatttgcggtagagatccagatacgccgccacatcctccgccacatcggcgtgatggatatattcccggatcacctgctcgtccaccagaaaaccgagcttctcatagaccgccatcagattggagagatcctcccatcctcgcgccgtcacaaactgcatgccgtccacatccgcctccacgcggtaaaagttgccggggcgaagttccaggtagcttaagatcgctccgctgatgtgctgtgccctcgcatactccttccagaccctgtaatccgcctccacggtcatatagcgcacacggtcgagggttaccatatcaaaatcgcgcacggatttgttgtactccggcggattgcccgccgccacaatcacccatccctctggtatcttctggttgccgaaggtcttgcactgtaaaaactgcagcatcgtcggcgcaagcgtctcagacacacagttgatctcatcgataaacaggattccctcccgctgcccgctgtcacgaatcctgcggtatacactggcgatgatctcactcatcgtgtactccgtcacagagtaggtcttccccgcgaattcctcctcccggatgaacggcagtccgacggcgctctgtcttgtgtggtgcgtgatcgtgtatgctaccagcccgaccccgagttctctggcgatctgctccatgatctgtgtcttgccgatgcccggaggtcccatcagaagcaccggtctctgccggatctccggaatctcataatcccccgcctcatccttctttaagtatgcctccacggtatgtttgatctcattttttgcctgcctgatattcatatctgtgtccctttttatctcttaaaattcaaaaatgaccgcgggaatactccctgcagccacttcacatgcactgtcttttgccggttccctgcaattataaatattctatgttccgctacaggaaaagtcaataactttacccgcaaaaggtttcgttacctgttgcatttcaaaaacaaatgtggcataatacatattgttcgggcgaaagatttttgatatcgtctgaatcagaatccggggatatagctcagctgggagagcgacgcgttcgcaacgcgtaggtcaggggttcgagtccccctatctccatttttttatgcttttacgaaaatgcggcagctattatttatcgtgctttgcgttgatagataataactgccgcattaagtatatcatgctttgcgttgataagtaataattgccgcattaagcttatcgtactttgcgttgataagtaatattattagaatagtagagaacaaaaaagttccagaataaacatgcgacggcaaattctttgaagcaaaattcacgtatttcttccatgccgcagatggcatcccattccgtgtctttgccacgtttgaactctcccggagtgtgtccgacaagccgcagacaatgggcggactttctggtgttcctaatggcacctcttcacagacaatataaaaccgcgcgaaccgaactcgccggcatctgctattgaaaatagggcagatgccgcctcagacagcggcttcgcgcggttatgttttgttcagaggtgccataaaggaacacacacgaaagtcctacaaattgtctgccggcttgcggacacagtccgtggagtgctccaaacttggaaagacacggattatcacagatgccatctgcggcatggttagaaataccggattttgcggtcagaatttgccgccgcatgtttatctgaaacttttaagtatctatttctcgtccaaaacgtcatccgcaatgcccattgtggacttcctgtgcgacaccatcagaattgttttgtccgcacattcctgctttaagcttcgcagaatcataccctcgtttaagctgtcaatattgctggtcggttcatccagaagcagaacatccgcatcgtacaaaaaggctcgcgcgattccgaggcgctgccgtattgatctcccctatctttgtgccgtcgtaggcgatctccccggcatccggctcatagaaccgcatcagaagcttcaacatgggcacagtgtatgttctgaccgcacgtctcctcttttccggtcacttcctccacaagcggtttttcctccagaatatccagcacacggtttccgctcgctaaggtatgatttagattatttgacagcgccgagagttctgccgtcggtccgaaagaacttgcgagcgcgatcaccgcaatcaccgccccgcttcccgggatgctgccgttttctgcaagcgttccgcccacgagcgccgtaagcacacccgcaaggagaatcacaccatcggtaatcacgcgctgtaagttctcgccccgcttcaatgcgccgttgactgtctccagatgtccggtctgctccgccatcttagcgatgcgtgcctcctgctgtccgtactgcagcgtctcctcaagaccgtagagattgtccagcacacaggtattcaaagcgccgaacgcctcccggtattcctgtccgccagcagctccgatccgtccgctgacaaccggaatcacggctccgacaagcacatagaagaaaagtgccagcactccgaaaacgggatgtatccttcctaaaaagatcgtcataaccaccgatgtaatgaccgcgatcggcgagatcgtgtgcgcataaaacacctcttcacggatttttcctgcatctccttttccctcgcacgcttctgttctatctcctgcgccgtcattttctccattctctagtcctcgtttctctcctttaaaatctgttccatcatcgcggcacagtggggttcaaaccttgtattttcccgctcctttatcttgcctctcaccatttccgtactctcgccccagcgcagatggcggtccgcatagtccgccaccgcgaggatctgcgcgagcaccggtatctcactgccgcgctttcccgccagatagccgctgccatcgtagttctcccgatgataatacacggcctccgcgattgtatccgccacctgcagttcgctgatcatatcatagcccatcttcacataagtctggaacacaccgtactcctcatccgtcaggttccgtctctggatcagttcgtctggaatgccgatcattccaatctcgtgcagaagacctgcctgataagccccggacaccatatcctccggaagatccagtctttttgcaatctcttttgcgtattccgccacctgcctgcagtgttcctcctcaccgggaatcttcgcgcccagcgcgcggcacatcgcattcatcacacgcatggacattccctgaagctttttcttttcctcatgtacgcgctgctccagcttttcctgtcttctgcgcttctccacccagtaatgctggatgcagtacattaacagatatgccatgaacacaaagcacacatacagataaggaaaacgcagtgccacattctccccgtagatatcttccgcggaagcattcaggtcgaaccggaagcacaaaatcatcgccgcaagatagaacagattgatgacaaaactgttgcggattcctaagataaatacaattccgcaggaaaacagcatcgggaacaatacactgaagtacccaatgctcgcgtggtaatacacataaaaaatcggaatgctgagcaacgtgaatgtcaccacatcgatccatctgcggtaatgcctccgacagaccgcaatattgccaaaaagcagcgccaccatgatccccaacgcaatcagataggatgccctgacaccgtaaaatatgccgttcaaaatactgattgcccagataaatccgaaaacaattttcatccagagtgccaattccctgtcctcataaggagcattgaccgtatcccagaagttctctcttattctctttgcttttgtctctgcgttcttcatcctttataccgtaatcctgccttcctcgatcaatgcaacaaccgcctgcgccactccggcgtcaaactgtttcccggctccctttcggaattcgccgataatgtaatccctgtcacagtgctttctgtaacagcgattggaattcatcgcgtctaacgcatccgccgcactgataatgcggaccatctccggaagctcctccccgtgcatgccataaggatagccgcttccgtcgtaccgctcgtgatggtatgtcgcgcccagatccgcctgcggcaaaaactccagaccggataaaatctctctgccccagaccgtatgttttttcatcacctcgtactcttcatccgtcagccgttccggcttatttaaaacggcgtccggcacagcgatcttgccgatgtcatgaagcaggccactgcggtagatcagctccagttcctcccctgtcgcatgaccacccttcatataatccgcgatgagtctggaatactccgccacacgctgggagtgttctctcgtataacgatccttggcatcaatcaactggctgatcgccgtgactgagtgaatcatcagattctttgtacccgcaaccgcctcctgcacctcgttctccagattttcctcgttctgttgctgccggatctgatagtttttgtaaaaaatatccatcgcaacaaccatcaggcagaatccccagtaaaaaatcgggtagaacaccctataatccctcggataatcgtaccttaatatatccgcaagcggcgtccagaaaaacgccatgatccacaggccgaatccgatacaaaccggtgccccaaacggcattccaagcggaaccaaagtgataacaggcagcagcagataccacagcagggaaaagccgtcattcgcacccgcgtacagaatggcagccgccagtagcaggaacaaaaagacagcaatccggcacacgagaaccacattccggaaccgccggattacaaacactgcagccacgctcacaattcccactgccaatgtcacaattccgatgatatattttcccagacggaaattctcaatatcgatcagaaacaacaccaccgcaaagatcagcatgaccccctgcagtgccccaacatccatgccggttgtcttctcataccggtacactctttttatcgtatctaccgctccccgaaacagcttcatttgtctccccgctccttttatccgccgaattagtttatcctaactattttcttcttgtcaagcatcattttcatatcttttattctaccaaatcccacttcacatgtacagcggagcattttatggggctgccgcaataagcatattacgctttgctctgataagtaatattattagaaacagatatttaaaagttccagataaacatgcggcaacaaattctgaacgcaaaatccggtatttctaaccatgccgcagatgacatctgtgatgatccatgtctttccaagtttggagcactccacggactgtgtccacaagccggcagacaatttgtaggacttttgtgtgtgtcccttattggcaccagacaacagatggcataaatgccacctttatgtcgaacaaaacataaccgcgcgaagccgctgtctgagtcggcatctgccatattttcaatagcagatgccggcgagttcggttcgcgcggttttatattgtctgtgaagaggtgccattagggacaccagnnnnnnnnnnggagttttcaaacgtggcaaagacacggaatgggatgccaactgcggcatggaagaaatacgtgaattttgcttcaaagaatttgccgtcgcatgtttattctggaacttttttgtgctctactattctaataatattacttatcaccccaaagaggtctatgcttatcgcggcagccccataaaaaactccggcagactcttacgaatccgccggagttactctctttgaggttttacagttctttttcaaagaatgccttcattgctgcaacagccgcatcctcatccgcgccgtccacgttgacggtcactgtctcgccctgctttacgccaagcgccatcactgccatcactctggtagcgtccacttccttctcacccttcttgatggtgatcttgctggtgaagttctttgcctcttttaccagaagacctgccggtcttgcgtgaattccaagttcgtcttttacggtgtaatcgaatgttttcatgttttccatttcctttctttttctaattatgtggcttttatttactccattccgacaacgcgctcacgcaccggaagtaccatcgcaggtgatacggacaattcgtcgattcccatcgcaacgaactgttccgtcaatgttgtatctgcgccgagttccccgcagattcctgcccagataccctccttatgcgcactgtcgatgaccatctgaatcatcttaagcactgccggatggtgggaatcatagaacatatcaagctttgcattctgtctgtcgattgccagtgtatactgtgtcagatcgttggttccgatactgaaaaaatccacttcctttgccagttcatcggcaatgatgaccgccgccggtgtctcgatcataataccgaattccaccttgccatacggaatcttctgtgcatcaagttctgcacggatctccgccatgatctccttgaccttctgtacctcccagacggaaataatcatcggcaccataatggcaatgttgccgaacgcactcgcacggtacagcgcacgaagctgtgtcttaaaaatctccgggcggtccaggcagatgcgcactgcgcggtagccgagcgccgggttatcctctttgtccagattaaagtagtcaatcttcttatccgcaccgatatccaacgtacggatgataacttttctgccgcccatcatctccgctacgctcttgtatgcggaaaactgttcctcctccgtcggataatggtcattctgcagatataagaattcactgcggaacagtccgattccctccgcatcattcattaacgccgcgccaacgtcgccgatgccgccgatattcgcgtacagcttaatggatttgccggattttgttgcggtcggcttgcccttcaatgccgataacagttctttgcgtttgctctcgtcttctttcttcttctgatactccgccagaacgctctcctccggctcaatgatgattttgcctgccatgccgtccacaatcgccattttgccgtccatgccgtccgctaccggcgtacataccagtgcaggaatgttcatcgtgcgggcaaggattgcggtgtgggaattcgtcgatccctctctcgtcacaaatgccagcaccttggaacggtcaagctggatcgtctcgctcggtgccagatcatccgccagaatgatcgcctgctccatctccatggactgcgcgccgctgccgtgatgcaaaacggcgatcagacgctcggaaatatccttgacgtccgccgaacgcgccttcatgtactcatcatccatgccggcgaacatcgccgcgaagttgtcccctgtcgtggcaacggcaaactctgcattgacctcctgtgtcgtgataatgttgcggatggaatcgcagtaatcctcatcgtccagcatcatctgatgtacctcgaagatcgccgcattgtcctctccgacttcctttaccgctttgtcgtagagtgctcccagctcctccatggcgacttttttcgcctcctcaaaacgcgtgcactcagctgcggtatcatcaacatgtgatcttctcaccgcgctgctcttcttggcaaactcccgaatcgggccgattgcgattccgctaaaagcggtttttccctcgatgcaaatcatatgcgttctcctttcattcttcgcttattcatctaatccacgcagtgtgttctctacctgttccagtatgtgtgcggcatttcccgcggcatagtcccccggcgcaatggcaagcaccggcagatttccgcactccgccgcaatcttttccctgcggtatgcgatctgcggtcccagaaggatcacatcataccccgtgcagtattccttgtaggcatgtaccccgacagccttcacttccagtggaagctgctccttttttgcatactttatcagttccccgcgcagaatgtcggtcgacattcccgcgctgcagacaagtaatatcttcattgactgcctccttttgtctccccaagcgcacggtagacatccacgatctcctccgcaagctcctgcgccagcgtcgccatcataaaatggtcctgcgcgtgcgccaccagcaatcctccgtctgtctgctgtccgcccgcctctctcaccagaagctccgtgtgcaccttatgtgcctccgtggcatagcgttccgcctcatccaactgctccgcggctccgccaaaatcaaatgcctttgctctgtgaatcgctgcaaacgcgcagcttctcgccgcacctgccttcgcaatgatctccatcgccgcctctctttgccgttctgtctcatcgatttcatccattctgcccacctccgtgaccgcctctgtcttattcctgaatctgcatcaatatggaaatgatgttcgccatctcgtcatcggaaaaaatcatgtggaatttccgctcgaccggcgctacatattttcgcagatcccggtataccccgtgatacttctgcacaatttcctcgcggtgcggattctctatggaaacgccccttcccgcaatccggttgactgcgcaggcaatgtgcatcacaagccctgtcttggtatctaacgacatcgggtattttccctcaatctgctccgccagttccatgagcgcctcctttaagcggccgatgtccacatattccagatgatcgcccagacagcggaacatttcatcaaaatcaacctccgccttttccatgcgctgtgtgcgcaaaagctccggcagacgctccaccggcaccgccagcacatccgccgctgacagaaacggaatcgccagaatgtccggatcatacgttccgataatacacaggatcactgctccctgcataagttccagcagtttttcccgcagcaggttccggtccgataaggataaggcaatcacctccgcgtccgtgcaggctttatgctggatgagatactgcttcatctgcagcgcaacaccctcacttgtggtgcagagcgtaacgattactttttttggggaatgccacagcgccccgagcgactctgccgccatccggtaaacccggtccaccccatcggcgattgccgcccccttcgaccactccattccgaatcttgtgaccggaagcgctaccgcgcggagctgtgttcctgtctcgcaggaaattgtatacaacatctgctgcaataccttctggtcatacacggcaaggactcccgcccctctatcgatcgcgagcagtttttgccgcagcagctcgtaggtctgttcatccttctgttcgtaaggaatgtcaacggcatacacgtttccgcggtgaagctgctcctcgatggtatctgagagtgcccgcgcgactccctgtccgtaaaagacaaataaaagtaccggcgacggttcgtccgtccggatctgtggctcgctgacctgcgtctcctcggcaggcggcatttccggtgcaagtaccgtcacgcccccttcctgatagaaatagcgcatctgcggttttaccagcgcatccaccgcctccttgtccgcgcggtagtttaagaatcccttgcgcacagacggatcaaagtcgctgatgtagaggtgaagttctcccccgtgatccatgtagtcccgcagataagcattcatgcaggctttccggatctgtgtctttaaggtcagtatctccttttcacaagggaacagcatcaggcaggtgagcacctcggactccagcgtgatcgtgcgcttcgttctgcatgcctccgccaccagaaaatgttccagcagcttccgccgctctggaagcggacgctccgtaagggacgggagccttatctccgccagcacgtggtcttccagcagggaaatcacatccagcgccttgtcgtcgcaggagagaaaaatcatcggcagttcccgcgcatcctccgcctccacaaaacagcggagcagcttgcgtctgacgttcaccgacaggaactgtaccttatgtaaaaacaggattcccgtggctgcctccgcgagcattcctccctgcacgccgtctccgaacagttctgcgatcgttgccgcatcgtccgctccgaaatccatgcagtcacacattacaaacggcgcctgttccgcaaccagtccctgctgtacggcagctttgtgcatcacttccgccatgtattttctgccgcttccctctcttccgatcagaaggacattcagtccgcggtgcggatacaaaagtgccgccctggcaagctgaacggcgtattttaaactgccgtcatatcccaccagttcccggaacgctccctcctcatccgcaaacgcttccgtcagcgaatataagaccggccgactgctgctcttttttaccctgccttcccggaggagttcgcccagtgcagtgctgacgttggtgcgctgcattccgagtgcctctgcgatctcattagtagagatcccgtgattggcattcacggagctgtggagttttacaaattcgtatatctgctctctgtttcccttcatatggttcctcataagaaatcgctgatctcttcgatacgcttactatatgttttttctttctgactgtcaatttcacatagtgtataaattttgtatccttcatctatactcattttcatacaaaatgctttctttttcaactctctttttgtctgttttttccaataatccgcttcttttcttcctgtcgcttctttctccgcttatttagtgtatatgtttctactgatcatatacacttagtgtataagttttttctttttttacatttttaaagattttgaaaaaaagaacccgtgagaacatctccgcaattcagatatgttctcacgggttcttatgataatttcaaggttatattttgatgtttcttgaaggaaaaatggcaccgtttctagtacagattgcagcgcccgcgctcctcgcgctccatatcacgcacatactgcgcctgatattccatcgtgatctcacgaagttccttgattccctcaatataaggcagatacatatcatacccgtccatggcatcatcgcatcctaactcactgtatcccagggaatcttttacgatctgctcccgctgttctcttgttgtatttttgatcagatattcttccatgtttttctccttattctaaaaagtcagacgcatttcataccacacagcgcctccgtgttccgatccggacacgccctcattccggtagccgaactgcctgtaaaacgaaagcagtctctccttacaggtcagcaccagtccctttttcccctgtgactttgtatccgcaattaccctgcgcatcagcgctgccgcatatccctttccctgctctgcggggtccgtcgccacaccaaagatcatctgccacgcaccatccttgctgtgcatatcggcatgttcatacatcgcgtcggtcagatgctcctcgtcggttgccatgccgttaatcatggataccagtttttcatcctcgtagagcagccagaaatgatcaggaaaacttgccagccgatcgaaaaatgcctctctccccgccgcttccgccgcaggaaaacactttgcttccaactctgtaaccgcctttagatcctccattgccgcatgtctgatgatcatcttctcttcctccctgcgccgttctcttatcagaacacattataagcgccttcttcgcccagtgcaagtaaagccttttcactttacgtgaaatatccacaaaaataaggctgtcgcatgtagcagatgttatccctttcagcgataagtgatattacaggaagcacatgatacagatttcggctggaactgcagatggaacattcgttgaaaaaaatgggggtatttcttccagccggatgactgtatctgattccgtgtttcttccacgtttggacaatccgacgggtgcatgtccgacacacccgagacaatggacggactttctggcagcactaactgtgctccctcatagacattattaaaccgcgcgaacagaactcgttgctatcagctattgaaattagggcagatagcagctcaaacatctgcttcgcgcggttatgttatattacgggagcacaggtaagtgctgcacaaaagtcctacaaattgtctctggggtgcggacatgcaccctaggattgctccaaacttggaaagacacggatcatcgcagatgcagtcaccggctggttagaaataccgcattttttgaacagaatgttccgtaggcattccaaccgaaatcgtagtggcatacttctcataatattacttatcgccgaaaaccaacgattcctctaatgcgacagccgcatttttacagaattctatttcacgtaaacgggaaaagtgctttcacagccggatacagcttccggaattcctgatagcgcgcctcatacttctccaccagcaccggatccggctcaacggtgtcaacaacatgcaccagcttctcacatgccgcctgtacactctcatattccccgcagcccactgccgcaaggatcgctccgccatatcccggtccctcctcgctctctatgagatcaagcttaaggtttaaaacagccgcaaggatcttcttccacagcgggctctttgcaccgccgccgcagatcttggagcgttcgatccggatgcccagactgcgcgccacctcgagggaatccctgagaccgaacgctacgccttctaacaccgcctgcgtcatatcttcccgtgtggtgtccatcgacattccaaggaacatggctctcgcatccgggtcgttgtgcggagagcgctcccccatcagataaggcaggaaaaatacccggttttctcccagatttttaatcttttcctgctcccgcgcatactccgtcgtctttaaaatctcatccatccaccacttgttgcaggatgccgccgagagcatacaccccatcagatgataaccgccatccgcgtgatcaaaggaatgcagggcattgtgtgcgtccacaccaaacttctcactggagataaagagcgtgccgctcgttccaagcgacaggttgcatctcccctcaccgaccgtcccggtgccgacggctgccgccgcattatcgcccgctcccgcaatgatctttacttcaggagaaagtcccagttcttccgcgatctctggctttaaggttcccaccacctcatagctctcataaagcttcggaagctgctctctttccacatggcagatctcaagcatctgctccgaccatgcccggtgttccacatcaaggagcagcataccggaggcgtccgaataatcggtgcagaacgttccggacaggcggtatgcgagataatctttcggcaacatgatctttttcacccgtttccacagatctggctcatgcttttgcatccagagaatctttggcgccgtaaatccggcgaaggcaatattcgcggtatatcccgacagtgtttcctttccgatcacctgatttaagtaatcggtctcttctgccgtgcgcccgtcgttccagaggatcgccggacgaatcacttcatcccgctcatccaatgccaccagaccatgcatctgccccccgaagctgatccccgccacccggcttttatcacattccgccagaagttcttttaagccgtcgatcgactgttcataccagtctgccggattctgttccgaccagcccggatgtggaaatgaaagatcgtaggtgcgcgatgcaattttttttattttaccatcggcatccatcagcagcaattttactgctgatgtgccaagatcaattcctatatataacatactctccccttttcttatcattgcaagacttcgctatgcactgcaagacttcgctatgcattgcaagacttttctatgcaaacggattctccgtcggatagcgcacgcctgccggctgattgtagccgatctcctccaccggcacaccgatatacttaaatacttcgtacagcgccttgccgtaatgtccgaatgccaccgcgccgtggtgcgggaaattcttctcaatcagcacatggcggtaaaatcttcccatctcagggatggcgaaaacaccgatcgatccaaaagatcttgtcgccaccggaagcacctccccatgtgcgatataagcgcggagctcgcagtctgcggtgctctgcagacggaaaaacgtaatgtcccccggcatgatgtccccctcaagggttccgtttgtcacctcgaccggaaggcttctcgccatgatcttctgattgcgcatctcacagaacgcaagctttccggaagtggtatttccacagtggaatcccataaaggtgtcctttaacgtatatggatattttccctcgatctcttcctcatacatatctgccggcaccgagttattgatgtcaagcagtgtcacggcatcttcgctcaccacggtgccgatgaactcgcttaaacagccgtaaatatccacctcgcaggacaccggaattccctgtccggtcagacggctgttgacgtaacacgggacaaaaccgaactgtgtctggaatgccggccagcacttgcccgcaatcgccacatacttgcggtagcccttgtgatcgcgcacccagtcttttaaggtcagttcatactgcgccagctttgcaagcacttccggctttttattcccggctccaagctccgcctccatctctgccacaaccgccgggattctctcatccccgtcatgtttatggaacgcctcgaataaatcaagctctgaattttcctcaatctccacacccagattgtaaagctgctttatcggtgcgttgcaggcaaggaaatttaacggtcttggtccgaagcttatgatctttaaattggaaagcgcaactaccgcgcgggcgatcggctcaaattcatgaatcatgtccgcacattcctctgccgttccaaccggatactccggaatgtatgccctgatattgcgaagctttaagttatagctggcatttaacattccacagtaagcatcccctctgccatccagcagactgtccccggattcttccgccgcagcgataaacattttcggtccgtcaaaatgctttgccagcagtgtctcggcgatctccggtccaaaattgccgaggtatacgacaagtgcatcacacccggccgccttcacatcctccagtgcctgcaccatatgtatttcactctccacgatacagatcggacattcatagatgtgatcctttccgtactttttcgtgtaagcgtccattaacgcctttctccggttcaccgacaggctctccgggaagcagtctctgctgactgccacaactccgatcttaatctccggcatattttctttgttcataaaaatctcctttccgtttcaaaaatagaaaccttcctgttccgtttttcctgtatctttcttacacctcaatattgacccccaaaagtccgttaaaagcaccacggattcctgcttcctcatgtgcgatcagccacttgttcttcgcagtcataagcgcatcctctccgcttttgggcaaggcaaaatcaatctccgtattcgttcctttcggaagaatcacaatacatttaaatccttcctccccgtcattgcacggcgcatagtgaagtgtcgttccatacatctcaacaaccgttcccgccgggacaaaaaatgcttccaccctggatgtgtcataagtaaacgcatcggtcacatccggcagccatcctaacagcagcaccatattggtcaccgcaatattgatctccgaattgcggtgatactccaacgcatttaatctgtgattgctgccgttacaataaccgatctgaatcggaagtccgccgtagatccgtctggcaaactctcccgcctccggcagcacctccagttcctccatggatggcacataaatgacatcctccggcagcggcgtgtgttccatctcgcggatcagtctcgtgcagtcaaagccgctccagactttcccatacctgcggaacttttcgtctttaattgaataaatctccatgattcccccctgtttgtgctcctttccataagtgtaccttatgagcagagtataacaggagacagtcatggagactacctgtttcttgtctttccaatgtcacttttttgtctttttatctaatttatttatcagtgaaataattcttcccgcacagagacggatttccttttccgacagccttccgtctgcatacgcctgccggatatccgcatcatctttctcacttcccggcataatcagatcatttccggcttcgatacacttccatggaatactgccgtcttccggcgctgttgtactccagtccgacatgagtacaccgtcaaatccccactcttctctggcaattacagtgcatagcgctctgctgtttgccgcgtgaactccattgacccggttgtaggatgtcatgattgcaaccggtgcgctttctttgactgcaatctcaaatcccctaagatagatctcccttagggctctctctgaaatatgcacatcgacccccatacggttgtcttcctgattgttgcatgcaaaatgcttgatcacagctccacaggttccctcctcctgtacacctcggacaaccgcagcagccatcttgcctgagagaaatggatcttccgaatagtattcaaaattccgcccgcacagcggatttctctggatattcattcccggtgccagccacagatcaatatggaattctttcatttcatgtgataccgctcttccgaaagactgcagcagttcctcattccaggtctgcgccattgccgttccgaccggaaacgccgtacagaactgatagtaggtcttggcattctcatgcttttgcatcggctccagatagccattttccagtgctcccagtacactttttccatagactttccccgaatctgcgtctacctcatacgactgatgcagccggattcctgccggtccgtccgccatgattaacgaccttattccatagggctgttccagcgcatgtgttgtctctcccgccgatcccggaacacggattcccgccgcgccgagtgtactgctgttttgttccacatggccatataagagcggaatcagttcctctgccggtatttttccggtcagatgcactttttgctcttcagcggcagaaagctttcctgcatcgctctctgctgcctccagccggcatgtgtgctctgtgagcgtccgttcgtacacatcaaattcccatgcctgttctaacttttgtgaatcggcaccgatccatatgccatacgttccggcttccagataccaggcactctgttcttccgaaaaacttgcaagcatgttttttggtattttaatctccagctgctgtatttcccccggcagcagacattttgttttggcgaatcccaccagccgctttttttctttttccattccggtctgcgggagtgtcgcatagacctgcactgtctccttcccggcataggttccacccgtattctgcacagacactgcaagttccagggaattcgtttcctcgcgtacagaccgctggcggattaggaatgatgtgtaggaaagtccgtacccgaacggaaataataccggcagattttcccggtcaaaatgacggtatccaacgaaaatttcctcccggtattcttccttttccagatctccgttcctgtatccataagtatccgctgacggatactccccgtaatgtctcgcccatgttgccgtaagttttccgcttggaaccgcctttccaaacaggatgtccgccaccgcataaccacctgcctgtcccggctgggaaatatttaacacagcccgtatattttttgcctgctctaaaatatctgtcagttctaccggaccaccggtattcagcaggagcactaccggaatctttttctcattcaaaaataacaggtcttcctgttccctgcggcttaattcatagtcgccgcgctcttttctgcggtcacttccctcacctgaaatgcggctcagcacataaactgccacccctgccccggcaatgtcctgttctgtaaccgctcttccctccgggaaacagaacggatgattggaatatgcgtcaaacggattctcaacccgttttgtttcttcgagaaccagttttttccattcctctctcgcctgctcataccgcttttcatagtcgcacagccacgcttcacttgtgatcattgcgcccgcttccagcagtccctgatagacagaaattgtcttccggttgttgacatccccggagccgattccaccttttaccgtcttttttgccccgcttccaaacagcgccataggaacatccaaaggcagcggcagaagcgattcattttttaataaaaccattgcctcttctgccacttttcttgccagaacatcatgcacctgctcccggatggacgttctttcctctatggttccactatatctccattctcttttttccatattctctgcttttcccttcaaaatgacagaaagaaccatacagaattttcttccatatgattctctgtccagatcgtgtttactctttcactccaccaagtgtcacaccggcgataatatattttgataataaaagatataccacaatgatcggcacaatcgccaccgtaatcatcatgtaaacttttcccatgtcaaagttcatatagtctgctccacgcaatgtcgcaattaagatcggcactgtcattttgctcttggtctgaagaatcagtgccggaacaaagtagttattccaggaaccgacaaaagtgaaaatcgcctgtaccgcgagcgccggcttcataatcggcagcacaatacagttaaacgtcctgaattcgcctgagccgtcgattcttgccgcctccactaaggacaggggcagtgatgactgcaggtagctgtacataaaatagaataccgcaggcgacgcgatgcttggaataatgagcggataccaggtatcatacaaccccattttcgtgatcagccgcaaaaatcccattgccgttacctgagtcggcatgaccaaaattgccatgataaaggtaaatgctatctttctggtcttaaattcataagcatacagaccatatgccgtcaacgcggaaaagtaagtacacaaacccgcacaggcagtcgagatacagatactgtttataattccgcggaacatcgggaagcttccgtcatttgccacattctttaaattttccagcagatgggtgcccggcaatgccgaaaaccccttttgcagctccgcatgagaacgggttgcattgataatcagaatatagaagaagaacagacacataaatgacagtacaatcaacacaatatgcgccagaacactccgcaaactgtttcctgattttgatttcatgttttatctcctccttcttctttcttctctggcagcttttttcgccgctgccttcgatccgtccggatcattatcatttgtcatcttatacacgataaaacataagatcgcactgatgatgaacagataaacagataacgctcctgccataccatagttcttgctctttaaatgattatttaagaacatgatcagtgtcatggatgtccggtccggatttccctgaccgttcgttaagatctgtggcacatcaaacatctgcaatccgccgataatcgaggtaatcagtgtatatgcaagaatcggccggatcatcggaagcgtaatatagaaaaatctctgcagactgttgcacccatcgatctcgcaggcctcaaatacctccacactgattcccatgattgctgccatcagcataatcgtcgtattgccaaaccacatcaggaaattcataagtccaatcagggaacgcgtgccaaaaacagatcccataaaatcaatcgggctattgatccatcccagagacatcagaatggaattgaccggtccactcgtggaaaacagtgtaaaaaataaaagtgcaaatgcagatgccatgatcagattgggcagataaatgacaaccttaaaaaattgtttgtgatgtatctttaatctggcatccgtaaaccagctcgcaagaacaagtgcgatcacaatctgcgggataaaaccgatcagccacagaatcagcgtgttttttccatatgccagcatatcggatttcagcagactgatataatttgccattccaacgaaattaggtccgacctccttaattccggaacggtaatattcataaaaactgtatctgacggtatctgccaacggaatcagcgaaaaaataaaatagataataaaaaacggaagaataaatatctgtccccattttccatagctgatactttttttcttttttttcattcctttgccctctctgccataatagttctgcggagcaaaattgctccgcagtcatggtcttattccggccactgaacttctgtgatatccggataacgctctttgattgctgtctcaaagtttgcctttgccttatcaaaatctacatttccctgcagataatcgctgaacgaattctgaatcagttccacgcatccctgatcgtatgcagataacggagcaatcttgatattctcagctaccggtgcaaagtagacaaacggattctgtccgccaaggaattctgacgagaagtctgcatcatcctttgctgcctctgccattccggacttcgtattcgtgaaatcagagtaatcctgtgaaatctttaacaggttgtcctgattgcttgtcattgcaagaataatatccttcgcatattttacattatctgttcctgttgccgcatggatgtaggaaccaccccagttatattcctgtggcgggttcgtaactgcccagttgccggcctctccatcccagttcggattcagcacaaagtcaatgccccatgccggaagcaggaatgcaaaaaccttggactgggagcccatggacttattccagtcatcattccactgacccttgatgttgctgtccagataaccggcatccagccattccttagaatcattcacccagttaatgattttctgatctactttgacggtagtatctcccggctgaacccaggattcatcaatactgttgccgtacagacggaacgtatccgcataggatgcaaaggtataatatccttttgcctttaactctgccgcggtgtccttgatggttgcccagtccttcaccttctcgccgactgcctcaggatcatctgttccgaatacatcctttgcaatatcgcggcggtatactaaaagtcccggacagcactgccaggtagatcctctctgcacaccgtcagaatcagaagccgtagttctcgtaaaatcatactgatccgccagatccgtctcaggatcaattccaagatctgtcagaggcatggcaacatccgcatccttatcggtatatttaaatacataatccgtctcggacaggaagatatctaccttgtcatctgccgcagcatctgcctgattcataagcgcttcatccagcttctgctgatatacaccatcctgattcggattgatcacccagtgaatctctgttccatccttcagcgttgttaccgttccgtctgaggaagtagattccacctccggatatactgcctcaagacgtgtacggaactcatcgttccaggaatagatgttaattacctttccctcaccactgaaatctttctcgtccgactctgtgcctgcagccgctgcactctccttgccgctgtctgctccggcattggcactgtctgtggcactgcttccacatcctgcaagtaaagtagcccccatagccactgtcagcattaagctgataacccgctgtttcatacttcaattcctccctgtattttagtttttcaacgtcagaccctttccctataatgtctgccgtcttcttgattacagatagaattgtactgaattttatgactggaatatactaaatcaattgtaaaaatatcagattcatgtcataataaccatattcttattttacggaggaaacagccaatggccttttcagaagaatggtacgagaccgaattaaaaagcagtgaacttgagacccttcaccgaccgccaaccgtggaatattccttttatacggcagtcaaaacaggcgatatggaaactgttgtcgccaactgcaaagaggatgcatttatccatctggagggaaccggtgtgctctcgcgcaatgcgcttaccaacataaaatatcattttgtagtcactgccgccatgcttacacgctactgcattgacggcggtttggagccggaacaggcctatcgtctgagcgacttttacattctgaaaatggacacctgcacaaccgtccggcagattgcggatcttcaccatgaaatggctaaagactttaccggcaagatggttcttcagaaaaaaagttccatcttatccaagccggtcgtacagtgtgtggattatatttacagtcatatcaaagaacgcattaccgtcgccatgctggcagaatataccggattatccgagagctatctctcccgggtattcaagcagaacctcggcatttccatcagtgactatatccgcgagaaaaaaatagaaaaggcaacgcatctcctgcgctactctgacaagtccatcatagacattgccaattacctttccttttcttcgcagagccactttatccagacgttcgagaactttaccggtatgactcccaaaaaataccgcaataaatattacaaatccatgtggtaactccccgcgaagaagccgccaccggagacaggtctgacgctttaagcaggttgctgacgctaaacggtaagtatcattaccggaatgccggagtgcagaaagttccgggataaacagatggcgcaaattctgatcgcaaaatccggtatttctaaccataccgctgctggcatctgttatgatccatgtctttccaagtttggagcactccacggactgtggctgcaagccagcagacaattttaggactttcgtgtgtgtcccttatggatgccgcagaacaaaacataaccgcgcgaagccgatgtctgagctgctatctgccctgatttcaatagctgatagcagcgagtttcggttcgcgcggtttaatattgtctatgagggagcaccgtttgttgaggtaagataacgataccttttttgcagagggtgttatcttacctctttttgatgtatgttagatagcataactctttacgtcggctcctatctgtctgaaataggagatactttcagtaggcttgtcgcctgtatcaactctgccgacaaagctataaaagatttcgattttgcgggtgttcgtttccttatccagttcgtgaataagaatacggtcaataaattcatggacgttttcgtaggtcagttcttcaatcgctgtgtatctgcgtaccagtgcgacaaacctttttacgtccgcgctgcgctcggtggcgttgtcgatttcctgtgacagctccgcaatcctccgggtcagcgtctttttttcttcatcatagccggaagtcagaaaagcaaattgttcatctgaaagtttccctaaagcgttgtcctcgtagagcttgcggaataagatgttcagctcgttaatacggttctgcgccttgtcaagttctttccgctgctgtgtcagcgtcttttgtactgcctttgcgctgcactcgttggcggtttcgataaactcctgttcatgctctttcacataagacgttactcgctgcaagtctgcaaggacaagttctttcaatacgcttttgcggatataatgcgtagtgcagagcatatcatttcttgcccggttgcggtagttgccgcaagtgtaggcgtgtttccgttcaagcgtcccggctccgcgtactgcatacattttgtagccgcagtccccacaaaagagcagcccggaaaacaggtcaatttcatcaacctttgtcgggcgttgccgggtggcaatccgcttctgtgcaagttcaaaggtttcttcatcaatcaaaggttcgtgagtgttggggaagaaataccttttttcctccgggttctttttcgtctttttcgacttataagataccttgtaggttttcccggttatggtatgccctaaatactctttccttgtcagaatgtcgtacagtgtcttatccggccagttgtaccatgcgttgagctgtgggcgggggtggcgtttgctccctgtcctgcggtagcgcagttccccgacggtcaatatctcattgtcccgcagccagttctggatttcacacatacggtcgccccgtacatacattgcaaaaatctgttttacgacgtgtgccgtttccgggtcgggtatcagatgattgcggttatccgggtcgataaggtagccgtaaggagcttcgccgttgacgcgctcgcctttctgtgcctttgcctgtttgacagcccggattttctttgaggtgtcgcgggcgtaaaactcgttgaaccagttccgcagaggggtaaactcgttatcttccctcgctgtgtctacaccgtcgttaatggcaatgtagcgcacttcgtattcggggaaaacaatctctatcagttcgccggttttcagataattacgtcccagacgggaaaggtcttttgttatgacggtcgccacgttcccggcttcaacctcatgcagcatggcttgaagcccctcacgctcaaagctcacgccggaaaatccgtcgtctacaaaaaagcgtgtgttgaaaaagtggtgttcgtcagcatacttttgtaaaatcagtttttggttctgtatgctttcgctttccccggcttgcatatcttcctggctcaatctgcaatataaagcggtaatcttgtctgtctgtaacattttgtcctcctttccgacgacagacaagcatggtatttgtactgtctatattataccacataccgctgcctgtgtcatgtataaaatgtgaagaaacgccctatttccgggcgtttgcggggttcagctccatgtccttgcgaatgagcttctttatctttttatccagtgtgtccgttgcgcgttcacttgcggacgaacatacaaggtaagtaacttttccgattttatgctccgttgtggtaacgggcgtctggttttgcgtcaaagaaaatccccctttctttcgcaaacatataatacagtctatgaatagcagcaagtccactattcaagaaaacaaaggctttaatcggacggttattagcataacctcatgggaatttcaccccggcatggttctcatgcagccctacccattgcctgcgacgctcttaacgctcggactgtggctgtaaggaagtatcattgtatattttgcgtgtcgtcgcccgcaagccgctacacttgctttccggcgcggtgttggtcgctcggctgtccgggcggggataacctcacccggatagcgtcatggcgcacccaccgtatggctcggcgcaaaaggaacgtatccgatttgccctatgctgcgccgccgttatcttgcgccgctttctttgtcaaggttcagaatggctttgctgccgcgtcagcagcggaacggaaaagggggagagagaaagcgtcccgccgctgcggtttattcctctgccttaaaggtgaggacagccatcatcagttttgcttgcagccgttcccgaatgtcgtggtctacgccaaaatagacgttcccgcgctcgtcgtacagcttccgcatggagaggcgggctatgtagccgctgaaatgctgcaagacaatcttcatagcgtccgggtcgccctttgtcgctgccaaaatgacaggatagggaacaagggctttttccgggtagccgggttcgttaccattcgtcccattcatcagcattttcctccagatatttttttagcagctcaaaagagcttgtccgcctgtactgtatcgtgcttctcgacgtatcgaacagctccgcaatctcggtgtcgttcattccctcgaaatagtacaggagtacggctttgcgcttttcttccggcaaagtacggattgcttcaagaagcagcttcggcgtgattttcttcccggctctttcaaaggcgatttcccctttgaaatattcatcaaaggtatgaagctgccgcgcttcttctaaggtcaagtcggaaaaggtaatctcccttgccttatgcctgtgcagctctttgtgagcgtcacacgcttcattgtgcagtaccgtattacaaaacttctggaaagcgcactgttttataaactccctgcgattaggttccacattctcaccccctttctcgttggaaagttggtggtgcttcccccttttcgcggggcaatactgccttttgaaaaaaacgccgaagattttcggatttttttcaaaaaattttttgagcagcaaaatacgcctgtccgaaaagcccggacagacgtataggtattgtaagcggtattcagatgattagacagttcatattgatagacgtagttttccccggcggtggtcgggctttttttgatgtgtcaatgaccgtcggattttgtcgatatggtatgtgcttcatggcggctacctccttttagccgccgcttttaacagtgataccgcgtcatttcattagaagataaaaagaaacggcggctttggtttttcaaagctgctgcggaaatcaaagaacgacaagcaacagttctgattttgctccaatatggttattgggggcacaaattaaatcaaaaaagagccgataacagcagtatttcaaactgcatattatcggctctgcgtctgtgcgtctggctcttttaattaaattatttttgttgttttttggctttattatatgtattagctaactgtccacaagctgctttaatctctctaccatgagaaactctcatggtaacttcaagtcctgtttgctctaattgatgtttgaacgcaaccatttcttgtttttgtggtgctctaatttttgaattactcgtcgggttgtattgcagcacgttaatcataacatttttgcccttaaaccattttgcaagttgccttatatctgaggaacggtcatttatacctggtaaaagcaaatacgcaaataccacttttcgattatgcctttgtgaataggacaatgcttgcttaacaacatcttcaatagcgtacatgtgcatatgaggaatgatgcagtttctcgcagcctgtgttgctgcatgtaaagatattgtcaactgaatttttagatgttcttcgcgcaatttttttaattgattaactggaccaactgttgatacggtaatgccgtcggttggaaagttaagtccatttctatctcgaagaatatggattgctgcaatcaagttgtcgtaattgaataaaggttctcccattcccataaaaacgatacgatttactttttgacgtatcaatatgacctgttgcacaatttcagatggtgttagattacgaacgaaaccattgcgtccggactcacaaaaaatacagccaacagaacaaccaacttgcgtacttacgcaaacagtcccaccatctcgccgtttaataaaaaccgtttcgatatacctgttgtctttcaattcataaacatacttttcagtatcgctacttttatagactttttttgttgatattgatagattttttttgtgaaatggctgtttatacaattccgcatataaggctcttgctttatcctctccaattacttccgacatttctttgtaagtaaatccgtatgggtcattcaatatttccgtaagtgtacttttaggtaagtgtttcatttaatatccttccttttgtttttcagagtttttgattatgatttctaatttttcaacatcaatgatatgtgttaatttacatttagggcagaaaagaggaaaatttcttaataccgtattataaaatacttgaaccctcgtctttccgttacaaattggacattttatccaatatttttcaagcataatatttctccttttgtgcaaaaaaatacaggtcaattctcaacatgagcattgacctgcatttatacatataacactacaacaaaattaaggcatagtttttatactatgtctatacatcgttagttttgttgtatagcatacgcaaaataagcatgacaaaaaagcccatattgaaaatgggaaaaatcttttttgatttcaatgcttatcgaatacgcatgctatgtaacataaacatttcccccttttaataatactatacaaaaaaagcggctaattgtcaacatatacatatgaattattttggctaactgattgaattgtgtagacatatccaagaagaaaggggaacagtaaaatgtaacagggtgaataactatggcaaaaagaccagtaccgaaatacgatttcaaggcttttggggcagcgataaaggcggcgcggacagggcgcaaggagagccgcaagaaagtgagcgacgaaatgtttatctcgccgcgctaccttgcgaacattgagaacaaggggcagcacccaagtttacagattttctttgagcttatgctccgctacaatatatccgtagaccagtttcttttggaaacgccgccagagaagaacacgcagcggcggcagcttgacgcgcttcttgacggtatgagcgatacaggcatacggattgtgagcgcaacggcaaaggagatagcggaagtcgaaacagagggcagataagaagtgtccgtcagaattgaataaggtttagagagcgttgtaatctttttttgaggattgcagcgtttttcttttgcggaagtttggcaaaaccgggcatagctccgtagtaaggcataagggataaaaacattcgtagcaagcataggaagcgggtacccacttccgtattttcccctcccgcgctgcggcgcgtcggttgaaaattgcttgttgggaagtgtcccaaaccctcggaacggaaaggaaaggagcgaatacatgaacggacgcaaaagaacggtgcaaatcaaattcagagtgacggaagcggaacgggatttaatactggaaaaaatgaagctcgtacccacccggaacatggcggcatatctgcggaagattgccattgacgggtatatcattcagatagaccatgccgatataaaggcaatgaccgcagagatacagaaaatcggtgtcaacgtcaaccagatagcacgccgcgtaaacgcgacggggaacgcataccaagaggacatagaggaaataaagggggtgcttgcggagatatggcggttacaaagattaagcctattaaaagcactctaagcaaagcccttgactatatcgaaaacccggacaagacggacggaaaaatgcttgtgtcctctttcggctgctcctatgaaacggcagatattgaatttgaatataccttgtcccaagcactccaaaaggggaacaatttagcctttcatctgatacagtcctttgagccgggggaagtcgattatcagaaagcccatgaaatcggaaagcagcttgccgacgcggtaacaaaggggcagcatgaatatgtactcacgacgcacattgacaaaggacacgtccacaatcacattattttctgcgccgtaaatttcgtagaccaccgcaaatataattccaacaaaaggagctattacggcatacggaacatgagcgacaagctgtgtcgggaaaatggcttgtccgtcgtcgttcccggcaagggcagcaagggaaagagctatgcggagtaccaggcagaaaagacgggtacaagttggaaaggcaagctaaagattgccgttgacgcgcttatcccccaagtttccagttttgaggaattgttgcagcggttacaggcggcgggctatgagataaagccggggaaatatgtgtcatgccgcgcccccggacaggaacgcttcacccgtcttaaaaccctcggcgcggattatacagaggaagccataagggaacggatagcgggcagacgggcaaaggcggcgaaagcccccagagagcagcgcggcgtttcgctgcttatcgacattgagaacagtatcaaggcggcgcagagtaagggctatgaacagtgggcgaaaatccacaatctgaaacaggcagcaaagaccatgaatttcttgacggaacataagattgaacagtacgcggatttagtcagccggattgaagaaatggcagcggaaagcggacaggcggcagacgcattgaaggacgcggaaaagcggcttgcggacatggcggtgcttatcaagaatgtttccacctaccaaaagacaaagcccgtctatgacgcataccgcaaggcaaggaacagggagaagtaccgcgccggacaggaacaggcgattatcctacatgaagccgccgcaaggtcgctgaaagcggcgggcattgcaaagctcccgaaccttgccgcgctgcaatcggaatatgaagccctccaagcgcagaaagaagccctttatgccgactatgggaagctgaaaaagaaagtccgggaatacgatattatcaagcagaacattgacagcattttacaggcagacaggcagccggaacgggaaaagggaacagagcgcggataaggatagcaaaatccccgccgctgtgctatgatagggctatcaaaaagcagaggagcgttgagcatggaaaaccagaaaatgccggaatatgaaaccatacgcgccgccgttgccggggaaaaatgggcggtggagaaagtcgtggagtgctacaaggacgaaatcgacaggctatcgacggtagcggtcagacagccggacggaagcacgaaacaggaaatcaacgaagatatgcgccagtccatcacaaagaagctgatagaagccctcccgcagttcccgcttgaagaaatggaaaagggaaatgtcagataggcaaaaaaagaacagggcgcggaagccagtatatgacttccgcgccctgtctttttatgggtgctgttttcgtgaatgttacgcagtagaacgccatttttgggggtaaaggtataaagtatcgcctatccgattttcacgcccggaaagccctgtaaatcaagggattttccgcgcctactgcgtaacaggggcgcgtcttttcctcatgcgctcggcggcttgtctgcgggtgatacgtttccggcagacggggcagtatttgacactgttagaggttgacgcaaagaacgcgccgcactcggtacatttcttcttatcccctgtctggtaaagctccgcataaagcagcctgtcggcgggaagcaccgcaacccggaaccacttgcagagaagcgaataggaaatgagctgcggacatacgcactcgtccccgtcgtccagtaagatacagttcccgttatcataattgcagcacgtccggcgcacaagggcgttgactttccggctctggggcggcgtcagccgcttaaccccgttcatacttcatcagcggcgtaaatgggaagctctgcaaattccgcttcggtcaaagcgtccactttggaaagggtgcgctttgcaagctcccgcatatccgcgtccatgtagggcagcgcggcgttgacattctcaatcaaagcccgcttgccgccctcgttgtaaatgctcaaaaggtttgtttcttcaacagtcagtctaatcatgctcatacctccatatcgtgattttttgtttttgccgccgcctttttcggggcggtctttgccttgtctgctttaagctgcgcccggatagaggggcggggcttccttatctccctgtcccggttctcccccttgtcaatcagcgcatacgtcccatgtctgccctcgattttggaaaaggaaagggtcttgtagggcagcatggagaaaaggcggtcagtgtcctttgtggctgcaagccgcatgaacgccggggaaagctctgccatgaaatgggtcttgttcgggctgttcggctcgtaatgccgcttcatttcccgcacaatgcgccgcgcttccgtttcaatcagcccgtcccgcaaagcggcaatatgcgccttgaaatcccccggcgaaagctgctcccggctgcgccgttcttcctgtaagagcgattgcagcgcgtccgggtcgttgggtacggcttcaaagcgttcaaatttcccaagctgcgggtctggggttccgtcaaaatatctcccggcttcctgtaccctttccccatgctcataaatcagcttcaccgtatcggcgggcagctccttttccttgacgcgctcataatgtttagagtagtccagttcgtacagattgcccttgattttcccgcgctcctttcccgtcagctcgattgcataggcaagaacgcggtcgcttgtctgctccatgtagaaacgccatgtgttgtggggcgcggtgtctttgaggaaaacgtcgcgctcccggaaacagtgcgtcccggacgggcggcagaaccacaaaagtgttttgtcctccctgtgggggcttgccgccgcctttgcgataatctctttgtcaatgtctaagtcgctctggtaaaagcctgtgttctgcttcataatcgcttcaagggaagcaaacaaatccatgttttcaaatttgctctgttccggcatgggtcagctcctttccaagtcctgtgacttctgctttgcgtttttcttctgtgccttttccttgtcggctctaagctgcgcccggatagagggtttcttttccggcttcgctcccttgccgcgctccttgtcggctttgacagcgttagccaggtcaacaagggaaatctgctcgcccgcctttacctttgcttccagttcgtcaacggtgggggtgttgttgatgataccgtcaatcatgttcccgttctgctctgtggtctgctcggcggttttcaagggattgtcccgctgcgcctgttctgcggcaacggcaaacgcccgcgtcccattccccataatcagatactttccgtcgtccgactggtggtgaaagccatatccggcggcttctatctgctcccggctcatggcggtcacatggaaagtccccctcggtgtcttgacagtttcgcccgtttccaagtcgtccggggtaagctgcttttgctcctgtaaaaactccggcacttcccgaaaacctacactgtcaacgaaatgcgccgcgtcctgtccgtcctgatgaagcactaccacgtcggaaacggaaaggctgtgtcccttaaaatctttggggtggtcgatattgaaacaggtgtaaatatcttcaagggaagtttccggcgcaaggggcgcggaatagacaagctcatagttcgccctgtcaaccacatttcccgccgcctgcaggcggtcgtatggctcaaagcggaaatcccttgtttcgtccccgccctttatctggtaaatggaaaaggtgtctttgtcctgtccggcggtctgcgccgtttcctgtgcctttgcgtaaagctgcttcacgtcgccctcggtcagctcgccgcttttgagctgccccataagctcgcggcatttctccggcgttcccgtataaagcacgtcgcccattttcgcccgcccgttctcctgtgtcacataggcttgcaagaggtagctgttttcccggctgtcgctgtaagggttccggcgcactctgtaaatcgtttccggggtaaaggcttctttcggggctgcgcccgctttttcctgtgcgccggattttcccggtgcggctgcttccggatccggcttctccggcgcggcttcctgtccctctctggtgggctgctcctgtccggcggtctgctccttgtcctgtgccttttgcagctccgctaagttctcgtctatggaattgataatctcggcggctgcgctgcgtatcgtttcaagggagcttttcagctcggacagctcccgcccgctgctccacccggcgacatagccgaaagagtagtccgacgtgtcaagcccgtaatgttggcagacagtataggcgacgctttccgcttcgacttcgcgggtgcggcggtcaacgtggggctgctgctcgtcctttggcgcgttgaggtcaatgtcgtgcagcttcgcatgggcgatttcgtgaatagcggtctttaaggtctgtaattcgctcatgccctcgttgatagcaatgcgcttgtcctccaagtggtagtagccatgagagccgccctcgatattctcaaaggcgataggaacgggggaagtcttttcaagggctgcgaaaaaatccttgtagcggtcaacgtcgcctgtcagctcgtcaaccgcaatgtccggcagctcctttccctcggtctgggaaacgtcaaagacggataccaccttgtaggcgggtatggtgacttccttttcctcggtgacgggcttcccgtccttgccgataacgggcttctgcgtgtgcgggtcgattttctgcatttcctgtttgattttatagggtgacggagcaatgattttaattcccttttgccctttcatcacgtttcgttcaaagttgttcttccaagcggaaaagcccgccacaagggaagcgtccggcttctgcatggcgataaggacggtgtttcggaagctgtaattatggaattttgacatgactttcagatattcccggtaacgctcgctgtcaaagagttccgcaataccctgttccagacggtcggtaatctctttgagcttttcggcgggcttctcgctcgtcagcacgatagggataaccgggcgcggctcctgtggctgctctgcggtctgcgccgttctctgccccggcgcggctgcgtccatttctacctttgacgggtcgggtctttccggctgcgggggctgcggcgttacccggtattcctccggcacgtcgcgcccgtcgtaccattctgtaaaggtgttgcggttgttgtagatatagcccttttcggtaaacataccgtcgtcgttaatggaagcgtcccgcccgtattcctcatacatgaaatactttttcgcttcttcgggaagttccggttcttccagttcatcaaccagataacgcccgtattcttcttcattgtggacggacggataaatccagtagcagtcaaggttctgtgcaaggttgataatgtcctgtaagctgtcggcatggtcgccgtattcaatggctgcaatgaatttctcccggtcgtcgtcaaactgcatttccaagagcttccctaaatagttcagctcgtcggggtgggaatactcgcttaaatgctccgtcaagccggggatagtggattgaaattctgtgaaatgccattcctcatagtgcttgaagtcaatcccgatacggtcaaagacttctttcagatgttcggcagtcgtggggaatgtcacccattcgcccgcgggtctgccctcggtgtacttcccaagattggaaagatagccgcttaaaatcggttctgccatttgttcgctcctttctttttcaatcatgcggtgcataagctcaaaatcctcaatgctcatgctcccgtcaaatacataggggttaaaatcctccccgtcccggtagggcttttcggaaaagggaagccccgcttcatgggcggctgccctcgcttcctcgataacctccgggggaagcctgtcgtcatgcgctccgataaaaccgtcaatgtcgttcatgctgttttcgtagtggtaacgcactccggcggtcagctcgtcaaggctcatgtcctcgcctaaatgcccgcaatagtagccgtttaagataacggcggcggggtcaatgctttttatttcctctaaccggctcctgtcctccgggtagagcgtatcgtccatatcaagatgaaaatattccgcgttccatgaacgcccctgtttccagaacgccacccatgcgataccgtccctaagctcgtcttgatagtcctttacggtgtcccgtaaacttgccatagtgaaaaacctcctttctctgcggcagcgtcataagctgcattttttggctgcatggtctactacgggtacgcccgcatttctgccaaatatttttgaaaatttttagagggtgaagccctccgcaaaagagggtttgggaaacttcccaacaagcaaaatccccgtccggcgcgtcagcgtcgcaacggggatttacggaagtgggtacccgcttcctatgcttgctattcaagtttttagttcttctgcacttcgatacggtagttgacgtatttcccgccagtgtcagccagaacgatagttccgtcgtaggtcttgcctgttttcggggagtagagcttcttcacattcgccttgccggatttaaggagcgcggcggcaatcttcgcggaaaaagcggtcttgcgttcctcgaaaaagcggtcattcttccacatgacaaaggcacattctttgttgctgcaataatagtttttcttcccctcatggacgggggaaccgcaacgggggcatttgccgacagagggcttttcctcccggaacaaatcctttttcccgtccagtgctgcggcgtgtgtctgcacaagctcccgcgccatagcttcaatgccggacagaaattcgccggggtctgcggctccctttgctatctgcgtcagattgttttcccattctgcggtaagctgtggggaagtgagtatatccggcagaatacagataaggctgttcccgtttttggtagggataagctgcttccccttgcgctccgcaaagccgccctttaccagtttttcaatgacggcggcgcgggtggcgggagtgccaagcccccggcgttccgcgtccgggtcggtgtccccgttcccggcgcgttccatagccgacaaaaggcttgcttcgctgtggggcttcggcggcgttgtggtatgctccgttacttttgcggcggggttaggaaagccctgtccctcggaaagcttcggcagcgtcacgtctgcattttccccgtcctccgcttcgggcttatctttcagcgtcgcccggtatctgcgttgaagctctttccaaccctccgcaagtacggtctttccccttgcggtgaagtctgtcccggcgcatgagaaaaccgccgtaaccgcttcataaatatgcggctcggcggtggcaaaaagcagacgcgcccccgcaagggtaaggatattcttctcgctttccggcagcgcgtccgggtcagcctttgcaagctccatagtgggaatgattgcgtggtggtctgatacttttttactgtctaatacctttacaacctccggcgtgaagtccgcgcccgccataaaggggagtttttcgcaaagcagcgcgataatgcccgctgcggtgccgcccatgtcgtcagtaagaaagctgctgtccgtcctcggataagtaaggagccgcttttcataaagggattgtgcaaggtcaagggtctgcttcgcggtgtagccgaaaatgcggttcgcttcccgctgcaaagaggtaaggtcaaagagcttcggcggggctgcggttttcttctctctggtgagggaaacgcataccgccgtttccgcttcgcaagcccctttcagcgcgtcggcttctgccttgtcggaaatcctcccgcttgccgcttccgcgccggataaatcaaggcgcacatgataatatttttctttctggaaatgggagatagccgcgtcccggtcggtgagcatttttaaggtcggggtctggacgcgccccacgttcaaggtctttccatacaggcaggagaaaagccgggtggcgttaatgccgataagccagtcagcctttgcgcggcagagggcagacgcaaagagcgcgtcgtattcctgcccgtctttgagggaagcaaagcccgccttgattgccccgtcctccattgaggaaatccacaagcggcgcatgggcttcttgcagcccgccgcttcgtagacaaagcggaaaatcaattctccctcgcgccccgcgtcacacgcatttaccacttcggaaacgtcggcgcggtgcataagctcttttagggttttgaattgcttccccttgtccgggtcaacggcgtactgccattcctccggcagaatgggtaagctctcaaaactccattttttatattgctccccgtaggcggcagcttccgcaagctgtaccaaatgcccgacgcaccatgaaatgaggcagccgccgccctcgatatatccgtctttcttttccttaacgccaagcgcggcggcgatagtctgcgccacgctcggcttttctgcaataatcagtttcattttctgttctcctttcggttgttttaggtttgaaattggtttatactttaagcattactataagaaacaggtgacaatatgaaatcaatacatactttcgatgtttttgctcctactgatgaacaggaagaagcaatgaataaaaaacgtggcgggcattacaggcgcggtaaaaacaaagaaatggattactttattgagtgtgctacttcgctatttcccaacaaccattattcaaggttcacacctatatatgatacgacaaaagagttttatcaactgattacttcttccgatacaacagaaagagctatactaaattggatagcttctaatcgtgcatggaattatttgtttggcttattacggcattattacagaacaggacaccatgacgataattatatctttccagagttcaaaatcgggtcggcttatgtggctgattatctgctcataggtaatagttcagacggttatcaatttgtctttgtggaattagaagctcccaacgggcggataacaaaagaaaaaggtactcgtttcggggaagtaatcaataaagggattgaacaggttagggattggcaaatgtatattgctgcaaattggaatgtaattgtagcagaattggaaaagcactcattctccaatacaaagttacccagacaattatacaaatattgcccttatcaaatctactatgctgtgatagccggactccgtaaagattttgagaatattcgtgatagaaagctccaactgcaaaatgaaaataacataacacttttgcattacgaaaatctcatagatgttgcaaacgaaaattaaaagtccattttcagcgttccggctcacttgcctttttctcctgtacctgtttcagacagtagcccacacaagggagctgccctttgtacggacaggaagcgcaagccggggaatggggaacgggcggcgcattgtcacgccgcccgcccggtctttgtatcatcatcttttcaaagggattgtcggtaaacagggtcatgcttcctcgtcctcctgttcttcatcagaaagcccgtccccctcgtccggctcgtcctcgtcgtagtcgtcaaaatcgaaatcttcaaggtcggtgccgcccttgacgttttgcttcggcttcataaacttaaaataatagaacgcgcccccgccgccaagaagtgccacgacaaggaaaagcacaagcccgcccgcattgcctttctctttgggcagctccggcggttcctcggtttccggctctgcttccttgccgctgcaagcggtcatgttgtccttgcagacggggcagctcacatttacctttccggcttcgcatttttcggtgcaactgcaaacggcgggcggggctgcttcggtgcttccgtcctccataagtgctaagaggtcggcttcgtccacttgattaaggaaatgtacggtgttctcgccctcgtcgtcccggtcaatgaggatataaaagtaattgccgtttttggtcgttacggtgataagctgcttgttgccgccgaaatcgtctacaagggtcgcgttcccgtccggggtaaggggttcttccttttggggttcctcgtagacaacgccgctgtcgttggtgtcgtcctctccctccggggtctgtgcaaaagcggtgacggaaaagccgcccgaaagcataagggcggcgcaaagtgcggtcagtgttctaaggattttcttattcattctcggtgtcctccatttcttcggtgtcgtggtctgcgggttctgcggggtagcccggcgcggcttccatgcccggaataccgcccccggaaagcatagcggaaagctcatgcggggaaaggcgcatggagcgcacaagctgtacgatttgcaggttttccgcttcggttttctgcgcttcaagcccccttaatttattctggtactcggtgattttctcgcgggtctttgcaatctccttgtcgatacgttcaattttgttcatagccatcaataaatttctcctttcagattttcatttttttgttgtcagttccaattcattaagccgtagcccttgatacaggagtaattgacggggtagctctttatcttgcaggcgtcgccggaattgccctcgacggtatagacgcgctccccgtccgtcccgataacaagccctacatggtctgcgctcccgtccccgtcccagtcgaaaaagatagcgtcgccgggggcgatattctcatagcccctcgcgccccattgcccgcgtgactggaaccagggtacgccctgtgactggcacccggcaaagcgcggctcgcttttcccggcttgattgtagcaccatgaaacaaaacaggcgcaccattccacgcggctgttaaatccgtaccagctccaaaagggtcgcccgcctacgttgccgacttgccgcttcgcaaggtctacaacggcggtgttgccggggcgtgtgccgtttacaagctgtacgccgcttaaatcctcggacgcgcccatatcgggggagccgccgccgaaaatcagcggcttgtttccgcttgtttccagatagacgcggtacatttcaagctgctgtggcgttagaagttcctccgcaatctcggaaatgggcttgttcgtcagcttcacgttgaggatatggtactcgtagggtacttcctcgctggtcgtttcccctgtttccgggtctgtgcttgtttctgtgcggtagcggatttccgtttcttccgtcagcgtcaaagtgtactgcatggcaaagacgcggtttagttctgcctgtgcgctctgcggggtgtaggtctgtaaaagggcggtgaggtaggacgctaactcatgggggttatgcccgatactgtcaaggtcatagcggtattcgtcatagccggggtgggtgctttcgatattgtcaatctgctgctgaagctcgttttcctttgcggcgtaattattttccgtcgccacaaggtcgctgtcctccgacgtgtaggaagtcccaagtatgccgttcatcaagccggagaacatggagccgcaagaggaaagccccgccgataccatgatgaataagagcagcgcggcaacggcgatacatacgcccgccgggtgccgccctacaaaagcgattgccttttttgtttcctcggcggtcttttttgccgccttgcgggtgttctctgcggctttctgcgccgtttttgcgccgcctttccttgccgactttgcatactgccgcttgatttgctgcttctgcatgaagcgggaaaggggattgcccgcaatctgcggattgtcatgtagggatttatggtactggaaatccacattcgccttgaacgccgctttctctgcctttgccgccgcccggtagggtttgagcttgtggctgcggtagccctccttgactttccgcgtcccgtactttgcgccgcgctctgccagttcttcggatttgtgcgccccctcaacgccggaattgtccttttcaacggaatgtatcttgttgtggacgaaaatacccgcttcctgtgcggggcgggatagcgggttattgtggggcttattccttcctatgggcttttcctgttcctcaaaatgtaggcgggtcttgcctttcccggtggcttcatcaaaggtgcgctcccgtacaagtttcttttctttggggatagccgcctttgccgcgtccagacggtcggctgctttgtccgattttcggatatacctttcaagctccggcgttgcccgttcctcgtcggtaaactgcaagcgggaagatttttcttttgctgtggcttctgcctgtgctttcctcgccgcctttttgctcgcctttctggtacgcgccccgtcgatacgctccaagacgcgctcggctgcggcggtgtcctgttcccgttctgcccccggcgcatggggaagcggcggcgcggcggctgtgggcgcgggagctgcgccgcccggtatggtctgcgctgcctgttccggcggctgcggtgcttcggtctttgcaaagtccgcgtcccttatccgcttgctgatacgtttctttttcccggtggcggcgtttacctcgacagccccctcgcgggtcattttctgcgtgactttctcacgcgctcgatactgttttatttttctgtccctccaatccgcgcccttgcaagggcgcaatactcggcgtttatctcaatgcctatataatgcctgtcaagctgccttgcggctgctcccgtcgtgccgctgccgaaaaaggggtcaagcacaacgccgcctttcggacagcccgccttgatacaggtttcggcaagttttggcgggaacgcggcgaaatgcccgcccttgtagggtacggtattgataagccacacgtcccgcctgttccgcatggtcggcatgagggcttcgtcgtagtagctgccgcttctcgcccggttaagcccctgtactttcccctgtccgggtacttcgtccgcatatttctgtcccgcgctgcgcccggtgcggtaccgcgccgccgttgtgggggctaacggctcggctatggcggctgcgtcatagaaatatttctttgacttcgtaagcagaaagatatgttcatagcagcgggtagggcggtctttcacgctctccggcatggggttttctttctgccagataatgtcgctccgtaaataccacccgtcagcgcgtagggcaaaagctaaaagccaagggataccgattaagtccttttgtttgcagccggaaacgcggttgttttttgcaatctgctgtccgtttctgcctttcgggttcttcgggtctgcatggtagcccttgttccctgtgccgcagtaggtgtccgcgatattcagccagagcgtaccgtcagaacgcagtacccggcgcagctcgcggaaaacctcggtcagcctgtcaatgtactgctccggcgtgtcctcccgcccaatctgcatatcaagcccataatccctaagcgcatagtagggcgggcttgtgacgcaacagtgtacgctttcctctggaagctcccgcaaggcatagagcgcgtcccggttgatgatggtgtcagttttcagcccgttcatgcttcgcccacttcctccggcttcgtcgtcattacccggtaaagctcggtgtctttcgggaagcggtctacaaagggcagcaccacgttcccgtagaagataagcccctcgcccgcttcggtgtgggtgacatatttcatctgctgcggggagatgttgagctgcttcgcaaggatagcccggtcgcccgccgcctgattgagcatgaggacaaaatcagagttttcaaagatattctccacttcgcgggaagcaagcaaatccttgacattctgcgtaatggctgtgggtatgccgccccattttctgaaacgcttccagatttcaacggaataggcggcggtctgttcctctttcaagagaagatgaaattcgtccataaaataccgggtggatttcctttctgcccggttgacggtgacgcggttccatacctggtcctgcacaatgagcatacctaactttttgagctgcttcccaagctgcttgatgtcaaagcagacaaggcggttgttcagctccacgttggtacggtggttgaatacgttaaggctcccggaaacatacagctccaacgccgccgcaatacgcgccgcttccggctccggctgcttcaaaagctcgttgtagaggtcgcccaagataggcattttctccgggtcggggtctgcaaggaaagggcggtacacgttcctaacggcgcggtcaatgacggtcttatcgacgggctgcaagccctccttgccgcctatgacaagctcgcagagggagaggataaagtcggatttcagcgcaagggggctgtcgtcctcgctgtaattgaggttaatatccatagggttcacatactggggcttcccgtcaatgcccttgcccgtaggggataagcgtatcacttgcccgtcaagccgctgcacaagggaaaaatactctgcttccgggtcgcagataattatgtcgtcgtcggtaatgaggaaagcgtttgtcatttcccgtttggcggcaaaggatttcccgcttcccggcgtacccaagattaagccgttggggttctttagctgcttgcggtcgcagagtatcatgttgttactaagggcgtttaagccgtagtacaaagccgcgcccgtctggaaaagctcctgtgtgataaaggggataaagatagcggtgcttgacgtggtaagccctctttgaatggggataaggttctccccaagcggtacagaggacataagccccgcttcctgttggtagtcaaggcgggttaaggcgcagttgttcttctgtgcaatgcccgccgccgcgaatacgtcattttccagtttccgcttcgtgtccgccatgttcaccacaaggaacgtcaagaggaacattctttcattccggctctgcaagtcctgtaagagattcttcgcttcgctgccgaaagtggcaaggtcggacggtataatatccatgtcatagccgctgcgtaccgctttcttctgttcctcgattttcattttgtcaaggtcggtaatcttgcgcttgattgtctttatggcttcggtctggtcgatactgtggatatgcagattgacgataacgcccgtttccaagtccagaatgtcagataagatacggtcgtttaattccggcgcaaggatttcaaggaatgaaaccgcgccgattttgcgccccatgcggaaataacgcccctcgccaaaacggaaagaggacggggcgataaagtcctttgtggaaagcccggacggggcaagccatgaaaaatcaaaggcaaactgcccgccctccgggtggaaaatgccatgcagcattttaaggcgttcatagcctgtcatggggcgggcagacacgcccaagagcttaaagttgttgagtacgtccgtttcgatacgggcaaggcgggatttcgccgcgcccagactgtcggcttcaatggcaaaggtgatatattttgctttgacaagcccgttgttgccctttgcaagctggtttttcagcatatcccggtattctgtgcggatagaattgaaagcgtcctcctgtgccgggatattgaccgccttttccgcttcgccgcgctgcgtcccttgattgatgaaagaaagctgcaccgaaacggaagcgtcaaagtagttgaggaagtcgcaccagttctcaaaaatggcggtcttgtcgtctgcctgtgcaagctgatagttaatatcttcaaaggcgacggtctttgagtatttccgtcccgtaaccttgcagataccgtccgggtacatctggatataggggattgtctgctgcgcggtgtgggctttcccgtcgccctttgcctgtctgatgatttccgcaatctgctttttctcggcgcgggtgagcttgcggggcgggttaggctttgtgcttcccgccgcgctgtttcttcgtgtttccttttgcaatcgctgatacctccttttcaagttttctctgccgttctaagacggaataaaagttgtctgtcctgtatggtcgttctttgggggctatgaattttgtccgtatgatgttcttcaccaccacttcaaggggctgtccatgcttctcatacatggcaaagaggaaacagggcagcatgacggcaatcatagccatagacgcaaggcttgtgcctgtgctgtctttgagcagaaagaaaagcggcaagccgaacaggagagccgccgcaaaacatacaatctgccgtttggtaaggttgaaagctacttttgtcttgactttggataagtctttgggtacgggtacatacgccaagtgaaaacctcctttctctgggtttggtgttgctgtaattttccataagggtaatcaaggcaaaggtcaatctatgccctttgcccgcccgtattatatgggggttatccgcgtcaaggtcgggtcgtattttcgccgcttcgctctgaaaatctccaccctgcccttgacacgccgctaatgcgcggagaatatcgacttcgccagtgcgccggatttgaacagggagaaacagaggataacggtataggctgcaagggagaatatcgcgctgtgcagattgtccgctattatcatgttgtttaccagaaccgcgtaaatgccgacgcatatcataatgaggaagccttgaaaaccgatagcgaacagggattttaggtagttgtttcctatctgcccccattcccggttcgtcatagttgcaaacgggataggcgataccgaacagtaaaggtaaatttctatcatgcgcccgtagaggataacggttatcagtacggacatgattttcatgcacaagctcacaaggcttgtttccatgacaagtaagagcagttcggggatttccatagcgtcaagcccgctctgcatggaagcaagggcggcggcaacatcaatctctgtgctgccgccgattacccccgccgcgccggaaacaacgtgctgcgccatatcgaacaccgccatagtaatgtcaaaggtgtgcgtcacaaggtagactgccacaaacgccttgaacacccacttgaagaacatggaagtgtcaacgtcgtgcatattgttcttttccgttaccatgctgataagctcatagcataggacgtaggtaatgacaagccccgcaatgggtacgattacattttcactaagggtctgtatcatggagaatatatttgcgttccacccttgcggggtctgccctacctctgcggcgatagtgccgactttttcgtttacgtccccgaacatagttgacagattaccgtttatggctcctatgaggatttcctttatccattcgttaatcgcgtcaagtatgctctgcataagcctttacccgcgcttcttaaccgaacaagccggaaagcagcggtacaagggtcatgccgataagggcaacgccgccgcccgccataagctgttttatccccaattaggtgtaaaactctgctcgatggcgggcggcggcgtacaaaaatctatatggtatttttaagagaaccgtcccggcgggacaggtcaggcagtgacctgttccacctccggaatgggtttgagattaaaatgaatttcgatagaaatgtgtcttgttttatcttcgtcaatgcgctcatgcacgacgatttctttgattaagcggttgagggtagctgcgtccagctctgtgatgttggcgtattcctgaatggcttccacccattgttttgcgtcattggcaagctggacttcatcggacagccgctttctgccctcggacacttttgttttaagttccgtctgctcggtctgtgtcttttccagcatggtgttgaagttctgctcactgatacgccctgcaatcatatcttcataaagccgcattaccattttgtccagaacctcaatccgttcctcgtcccttgtaagggagcgttccattgcttcccgctgttcccgctgctcggcttcacaggtattggtcaggcggtcagcaaccgctttcccgtccatcagggcagctctggcacattcccggattttccgcagcacatgactgtaaagggtgtcataatcaatccggtgctgggtgcagtggttctttccaaaggcattgtaggtcttgcaggagtaaatctgctggggatgttttgcgtttgtgtagcgtaccgtcagagacttcccacactcgccgcattttatcagtccggcaaacaggctgatttcattggtctgccccggacgctggcgggatttcagcttgttctgcacaatgtcaaagctcatgcggtcaatcagcggttcatgctgtccttccactacaatccagtcctccggcttcttttccccaatcgtgccgattttgaaacggtagtcctttttctgggaagcaatcgccccagtgtaaacgggattcatcaaaaggtctttgataacggaaaagtcccacatataccgcccgttttccgggtctttcttttcccatttggtgcgggtattgcgaagcccccgttcccggttccaccatgtggggcaggggattttttcttcctccagccgtctgcggatatagttcggaccatgaccgtttagggcatatccgaaaatcagccgcacaatcggggcggtttcctcgtcaatgagcagatggtttttgtcctccgggtctttccgatacccaaacggggcaagacacccggtaaactgtcctttctgcgctttcagaagataagaggaatggactttcttggaaatatccttgctgtacatctcgttcaggatattcttgaacggggcgatgtcgttgttatcccgcagggtgtcgataccgtcattcatggcgatatagcggacaccgtttcttgggaaaaagtcctcaatcaaatgcccggtttgcagatagttacgccccagtcggctgaggtctttcgtgatgacaaggttgatttgcctgcgctcaatggctctcaacattctctgtaaatcaggacgctccatattaagacctgtgaagccatcgtcctgatagactgccacaacctcccatccctgcttttcgcagtatttttccagcatatcacgctggtttgcgatactggcactttcgccttgcaggtcatcgtcctttgacagcctgcaatagaccgccgcacgatagcccccggcaagtgccgaaccgattgtcctgtattccatttcgttcatcatagccatttacccacacaatccagacggtatctggctcttttgaacctcatcttcattatacttcaaatctttctttttagcaagatattctttcgcatttgtctttccgtatttctgggaaatcaggctgacgaacacatcagttgcgtccagctccccgtcaaacactgttgtaacatgaatctctgttttgttttttgccataggcagttatcctccatacatgaaaatagccagacagagggtgtcggcaacgaagtccggcaacgggcttcaaaagaccttgcaaacaatctcaatctggcgatggttactatttatacttttcttttatttttctgttgttttggttgtcataggggagaaaagccgatagtttcgggattttccccggcaaccggctcggcaacgggatagcaacaggggatgcaacgggctgtcattttcagaatggaagctccatcggttctgtgacctccacaaaaccgtccatcgttttttcagacgggttgccggagtccgttgccgggttttcacgctcccagnnnnnnnnnntgaaaacattcttgggttcgggaagtaccgccagccagaaatgcactggttcataatctcgttgatttcccggatttcccattgcttcggctcgtcaaaggcatggttcaaggcttccttatagagctgcttggagcagaccatgctcccggtgtacttatcaagatacgcctgtatcatcccggctttggtgtcctccggcataaaatcccgctggtgttctttgagataccgctgcatggcagggctgaaagccagcttgaacctgccgcttctgtaaatttccatcgcttctgcccacatctgctcgatataggctctggaagcggcttcgtcctccaaaatgtgaacctcggcttgctccgggtacaccatgacggggataaagcggcggttgccggaacggtcaaggggcaggaagtcaagggcattggaagtgccgccaaacacgcactgacgggggcggtctgccgggtgggtttcatagggtatcttgtaaacctctttctgccggcttaaaaatgacttgatttcctcaatgctcttggcgttggcggttgccatcatttccgacatttcgatcatccagtgaccttgcagcttgcggtacacattgtcatcgtccagcttccgcaaatcatcggagaaccactcgtcccggactgccagcagacggaagaaagtggacttgccagccccctgaccgccgaccagacagagcatgatttcaaacttgcaccccggctgaaaggctcgtgagattgcacccagcaggaacagcttcaatgcttcataggtgtaatcgtctgcgtcagcccccagaaagtgccgcaggcagaagcggattcgctctgtcccgtcccacacaagggaacttaaataatcccggatggggtggtacttgttttcattcgccacaatcccgatggcgttatcaatctttttctcattggtaagcccgtaggtttcttccagatagagaagcagatacttcatatctgtatcgttcagggcggtgctttccctgtggaagccgatgggctttatgatgtccttgcggtcagtcaggatgttgtatgcgatagccccggaaagcagcgggtcacgctggaatacagtcaggcagttccgtatgctctgacggacaccgcctttctcggtagtttccagcccctccttgatttcctcaatgctctggggtggctgcatggcgttcatggtgttttttagttcttgctgcgtctgcggcggcaagctctgccattcgctgttcaagctgtatcacatcctttccgtagtccgtaatcaaagccgctttttcctctgtttccccgaacagcagcacatccagcagatactccacttggtcttgcttctgtaaggcttctataaaccggggatgaaaggcttcctccggggagtgtggggcgtagtccgttctccatgcccgaagcagatggagataatcggcaagaatacggaagcagcggttctttgcttcctgaaactgttcctccggggatttctgccggggctttggctttttttcctttcccggcggtttccagtcctcataggaaagcccgaagtcctgtgccagctgtacggcggcttctttctttctcagcccatacagggcggcggcaaaatcaatcacatccccatccgcaccgcagccgaagcagtggtaacgccgatccagcttcatgcttggggttttatcgttatggaacgggcagcaagccatcccgttccgacctacatggattccataatgctccgcagcctgtcttgttgtgacggactgcttcacagcttcaaatacattcaaatctatccctccttgaaaaaagaaaagcacctgacattctctgattgaaaatggcaagtgcctgttaaagttccatatcctgttgtctgtgtttcgtctgttcctgggcagttctttgtgcttttttctcgtctgccttatcctgcaagacttccttgatgggctgcttcttgggcggctctttgctttcctctgtgccgggggtggctttctgtacccagtagcggatatcccgcagcttcttcaaatcctcctgcacctctgtcagcggtactttcagctctgcgatttcgctgagaagtttttcctgctcctgttgcagttccttttgggtgctgtccttatcgtccgggtgcttggcaaggtaggcggcggctttcgcataccgggcgacctccgggtgttcctgtttgaatttctcctttgttttcttgaaaaatatcttctggtacttctcatagacaggcttacattccttgcagtctgtccggctggcaagaatcccgtcaatcactttgctgcgggcttcctttggcttcatctgactgcggtaatctgcggctgatttcccggaagattccagaaatacttctaagtcctccacagtagaaagccccttttgacggagataggacagggcttcgctgactgcctttaagtcctgtgaagtcccccggttctgtccagcccttgtccagtccttgaaaatttcatcattgacgaggaagctgcacccgtagtcaagcagatatacaatttctgccttgccgggaatggtccgactaagatagcccgtatgctcacagagcagcaaatcctcacgccggggacgctggaataccgcaggacgggcagcacccgccgctaccaccccggctatgagtgcaagtgggcgaccaataccgttgtaaagagaatgaaggaaaaagtaagaaacaagccaaaatagccggtttaaataagtttttgcaaatctattatgcaagagtaatggaaatatataagaatatagtatagttgcataagaaaaaagcctgaataatcaggcctatttcttatgcaaaaaaatcaaaaattgtgttgacatctcttaacaggtctttcatcaaaatcttctgtatgaagttttcaaggtacaatagcgaacttcgttcgcattagaaattgcttcgcaatttccgcaacatcggcatttttcaatgcttttgttactgtctgactgaatgtttatcagtcattagaaacctcaacgtattgaaatctctaatcactggtaaaaccagttttatcagaacaacactaccctgttggaataggttagcaccaggtcgtctgactcttgatgcccgttctatatagaaagcttttcagcttgtttgctttttaatctggcagccacctgctttcccataccgtcgccagtatagtatcatcggccgcttaggtcttaaccatcgtgttcgggatgtggacgggtgtttcccctaagcgcatcgccaccagaaaaaaaagaggaagcatgagctttccttttacctcaatgaccgggggcgtgtcacttacaacgaattatgccggaaatgccagcatgggtgcaagcagagcttccgggcggttgtgattgactgcccccgttatttatccaaacgagcaaagaaaaaggaggaacacaccgaatgaattttgaatttggctgggtaaagtcggatgcgttccatggaagcttaaataatgcagtatatacgtttggtgcggaggatggcgctacggatgttctgacggcatcctggacggcgaacagttatacgctgcattttgatccgaatggtggtgcagaagtcacacatatagaggatatggtgatacagtacgatgaggaaatcacgcttccggatgcaacggcagcttatgtgaaatatacatttgatggtcagaatgtgacacaggatgtattgagcggggcgatccggttagaaagtgatggagattcggaagcagcagatccggaatggaatgcctatggaacattctgttcaaaaaatgcggcatttctaaccagccggtgactgcatctgcgatgatccgtgtctttccaagtttggagcactctacggactatgtccgcaagccaacagacaattttaggacttttgtgtgtcccttatggcaccaatgaacaaaacataaccgcgcgaagccgatgtctgaattggcatctgccctattttcaatagcagatgccaacgagtttcggttcgcgcggttttatattgtctgtgaagcggtgccattagggacactagaaagtccgctcattgtctgtggcttgtcggacacactccgggagagtccaaacgtggaagagacacggaatcagatgcagtcatccggctggaagaaatacacacatttttctccaacgaatgtttcatatgcagttcca
